(19) United States
(12) Patent Application Publication
(10) Pub. No.: US 2009/0203011 A1
(43) Pub. Date: Aug. 13, 2009

(54) METHODS AND NUCLEIC ACIDS FOR ANALYSES OF CELL PROLIFERATIVE DISORDERS

(75) Inventors: Volker Liebenberg, Berlin (DE); Juergen Distler, Berlin (DE); Joern Lewin, Berlin (DE); Fabian Model, Berlin (DE); Reimo Tetzner, Berlin (DE); Rene Cortese, Toronto (CA); Dimo Dietrich, Berlin (DE); Thomas Schlegel, Berlin (DE)

Correspondence Address: DAVIS WRIGHT TREMAINE, LLP/Seattle, 1201 Third Avenue, Suite 2200, SEATTLE, WA, 98101-3045, US

(73) Assignee: Epigenomics AG, Berlin (DE)

(21) Appl. No.: 12/332,703

(22) Filed: Dec. 11, 2008

Related U.S. Application Data
(63) Continuation-in-part of application No. PCT/EP2008/000384, filed on Jan. 18, 2008.

(30) Foreign Application Priority Data
Jan. 19, 2007 (EP) 07100829.6
Jun. 11, 2007 (EP) 07110019.2
Jul. 30, 2007 (EP) 07113449.8
Dec. 11, 2007 (EP) 07122844.9
Jul. 2, 2008 (EP) 08159537.3

(51) Int. Cl. C12Q 1/68; C07H 21/04

(52) U.S. Cl. 435/6; 536/23.1

(57) ABSTRACT

Particular aspects provide methods, nucleic acids and kits for detecting cell proliferative disorders. Preferred aspects provide genomic sequences, the methylation patterns of which have substantial utility for the improved detection of said disorders, providing for improved diagnosis and treatment of same in patients.

### CROSS-REFERENCE TO RELATED APPLICATIONS

[0001] This application is a continuation-in-part of Patent Cooperation Treaty Application Serial No. PCT/EP2008/000384, which claims the benefit of priority to European Patent Application Serial Nos. 07100829.6 filed on Jan. 19, 2007, 07110019.2 filed on Jun. 11, 2007, and 07113449.8 filed on Jul. 30, 2007, and additionally claims the benefit of priority to European Patent Application Serial Nos. 07122844.9, filed on Dec. 11, 2007 and 08159537.3, filed on Jul. 2, 2008, all of which are incorporated herein in their entirety.

### FIELD OF THE INVENTION

[0002] Certain aspects of the invention relate to genomic DNA sequences that exhibit altered expression patterns in disease states relative to normal, and in more particular embodiments to providing methods, nucleic acids, nucleic acid arrays and kits having substantial utility for detecting and/or diagnosing cell proliferative disorders.

### BACKGROUND

[0003] CpG island methylation. Apart from mutations aberrant methylation of CpG islands has been shown to lead to the transcriptional silencing of certain genes that have been previously linked to the pathogenesis of various cell proliferative disorders, including cancer. CpG islands are short sequences, which are rich in CpG dinucleotides and can usually be found in the 5′ region of approximately 50% of all human genes. Methylation of the cytosines in these islands leads to the loss of gene expression and has been reported in the inactivation of the X chromosome and genomic imprinting.

[0004] Development of medical tests. Two key evaluative measures of any medical screening or diagnostic test are its sensitivity and specificity, which measure how well the test performs to accurately detect all affected individuals without exception, and without falsely including individuals who do not have the target disease (predictive value). Historically, many diagnostic tests have been criticized due to poor sensitivity and specificity.

[0005] A true positive (TP) result is where the test is positive and the condition is present. A false positive (FP) result is where the test is positive but the condition is not present. A true negative (TN) result is where the test is negative and the condition is not present. A false negative (FN) result is where the test is negative but the condition is not present. In this context: Sensitivity=TP/(TP+FN); Specificity=TN/(FP+TN); and Predictive value=TP/(TP+FP).

[0006] Sensitivity is a measure of a test's ability to correctly detect the target disease in an individual being tested. A test having poor sensitivity produces a high rate of false negatives, i.e., individuals who have the disease but are falsely identified as being free of that particular disease. The potential danger of a false negative is that the diseased individual will remain undiagnosed and untreated for some period of time, during which the disease may progress to a later stage wherein treatments, if any, may be less effective. An example of a test that has low sensitivity is a protein-based blood test for HIV. This type of test exhibits poor sensitivity because it fails to detect the presence of the virus until the disease is well established and the virus has invaded the bloodstream in substantial numbers. In contrast, an example of a test that has high sensitivity is viral-load detection using the polymerase chain reaction (PCR). High sensitivity is achieved because this type of test can detect very small quantities of the virus. High sensitivity is particularly important when the consequences of missing a diagnosis are high.

[0007] Specificity, on the other hand, is a measure of a test's ability to identify accurately patients who are free of the disease state. A test having poor specificity produces a high rate of false positives, i.e., individuals who are falsely identified as having the disease. A drawback of false positives is that they force patients to undergo unnecessary medical procedures treatments with their attendant risks, emotional and financial stresses, and which could have adverse effects on the patient's health. A feature of diseases that makes it difficult to develop diagnostic tests with high specificity is that disease mechanisms, particularly in cell proliferative disorders, often involve a plurality of genes and proteins. Additionally, certain proteins may be elevated for reasons unrelated to a disease state. Specificity is important when the cost or risk associated with further diagnostic procedures or further medical intervention is very high.

### SUMMARY OF THE INVENTION

[0008] Particular aspects provide a method for detecting or differentiating cell proliferative disorders, preferably those according to Table 2, and most preferably lung carcinomas, in a subject comprising determining the expression levels wherein determining expression levels also includes determining methylation levels and patterns of at least one gene or genomic sequence selected from the group consisting of PTGER4; RUNX1; EVX2; EVX-1; SHOX2; SEQ ID NO: 6; CN027; LRAT; IL-12RB1; TFAP2C; BCL2; ARIDA5A (SEQ ID NO: 12); EN2; PRDM14; SEQ ID NO: 81; ARID5A (SEQ ID NO: 82); VAX1; EN2-2, EN2-3, SHOX2-2, ONECUT1; FOXL-2, TFAP2E and BARHL2 in a biological sample isolated from said subject wherein hyper-methylation and/or under-expression is indicative of the presence of said disorder. Various aspects of the present invention provide an efficient and unique genetic marker, whereby expression analysis of said marker enables the detection of cell proliferative disorders, preferably those according to Table 2 with a particularly high sensitivity, specificity and/or predictive value. Preferred is that the lung cancer is selected from the group consisting of Lung adenocarcinoma; Large cell lung cancer; Squamous cell lung carcinoma and Small cell lung carcinoma.

[0009] In one embodiment the invention provides a method for detecting cell proliferative disorders, preferably those according to Table 2 (most preferably lung carcinoma), in a subject comprising determining the expression levels of at least one gene or genomic sequence selected from the group consisting of PTGER4; RUNX1; EVX2; EVX-1; SHOX2; SEQ ID NO: 6; CN027; LRAT; IL-12RB1; TFAP2C; BCL2; ARIDA5A (SEQ ID NO: 12); EN2; PRDM14; SEQ ID NO: 81; ARID5A (SEQ ID NO: 82); VAX1; EN2-2, EN2-3, SHOX2-2, ONECUT1; FOXL-2, TFAP2E and BARHL2 in a biological sample isolated from said subject wherein under-expression and/or CpG methylation is indicative of the presence of said disorder. In one embodiment said expression level is determined by detecting the presence, absence or level of mRNA transcribed from said gene. In a further embodiment said expression level is determined by detecting the presence, absence or level of a polypeptide encoded by said gene or sequence thereof.

[0010] In a further preferred embodiment said expression is determined by detecting the presence or absence or level of CpG methylation within said gene, wherein under-expression, which is understood as indicated by presence of CpG methylation, or by presence of a certain level of methylation, indicates the presence of cell proliferative disorders, preferably those according to Table 2 (most preferably lung carcinoma).

[0011] Said method comprises the following steps: i) contacting genomic DNA isolated from a biological sample (preferably selected from the group consisting of cells or cell lines, histological slides, biopsies, paraffin-embedded tissue, body fluids, ejaculate, urine, blood plasma, blood serum, whole blood, isolated blood cells, sputum, oral epithelium and biological matter derived from the lung, preferably derived from bronchoscopy (including but not limited to bronchial lavage, bronchial alveolar lavage, bronchial brushing, bronchial abrasion) obtained from the subject, preferably a human subject, with at least one reagent, or series of reagents that distinguishes between methylated and non-methylated CpG dinucleotides within at least one target region of the genomic DNA, wherein the target region is the region which is investigated and wherein the nucleotide sequence of said target region comprises at least one CpG dinucleotide sequence of at least one gene or genomic sequence selected from the group consisting of PTGER4; RUNX1; EVX2; EVX-1; SHOX2; SEQ ID NO: 6; CN027; LRAT; IL-12RB1; TFAP2C; BCL2; ARIDA5A (SEQ ID NO: 12); EN2; PRDM14; SEQ ID NO: 81; ARID5A (SEQ ID NO: 82); VAX1; ONECUT1; FOXL-2, TFAP2E and BARHL2 (including promoter or regulatory elements thereof) and EN2-2, EN2-3 and SHOX2-2 and ii) detecting cell proliferative disorders, preferably those according to Table 2 (most preferably lung carcinoma), at least in part. Preferably the target region is located within a genomic sequences selected from the group mentioned above. It is preferred that the target region comprises, or hybridizes under stringent conditions to a sequence of at least 16 contiguous nucleotides of SEQ ID NO: 1 to SEQ ID NO: 12; SEQ ID NO: 79 to SEQ ID NO: 83; SEQ ID NO: 119 to SEQ ID NO: 125.

[0012] Preferably, the sensitivity of said detection is from about 75% to about 96%, or from about 80% to about 96%, or from about 85% to about 96%. Preferably, the specificity is from about 75% to about 96%, or from about 80% to about 960%, or from about 85% to about 96%.

[0013] Said use of the gene may be enabled by means of any analysis of the expression of the gene, by means of mRNA expression analysis or protein expression analysis. However, in the most preferred embodiment of the invention the detection of cell proliferative disorders, preferably those according to Table 2 (most preferably lung carcinoma), is enabled by means of analysis of the methylation status of at least one gene or genomic sequence selected from the group consisting of PTGER4; RUNX1; EVX2; EVX-1; SHOX2; SEQ ID NO: 6; CN027; LRAT; IL-12RB1; TFAP2C; BCL2; ARIDA5A (SEQ ID NO: 12); EN2; PRDM14; SEQ ID NO: 81; ARID5A (SEQ ID NO: 82); VAX1; ONECUT1; FOXL-2, TFAP2E and BARHL2 (including promoter or regulatory elements thereof) and EN2-2, EN2-3 and SHOX2-2.

[0014] The invention provides a method for the analysis of biological samples for features associated with the development of cell proliferative disorders, preferably those according to Table 2 (most preferably lung carcinoma), the method characterized in that the nucleic acid, or a fragment thereof of SEQ ID NO: 1 to SEQ ID NO: 12; SEQ ID NO: 79 to SEQ ID NO: 83; SEQ ID NO: 119 to SEQ ID NO: 125 is contacted with a reagent or series of reagents capable of distinguishing between methylated and non methylated CpG dinucleotides within the genomic sequence.

[0015] The present invention provides a method for ascertaining epigenetic parameters of genomic DNA associated with the development of cell proliferative disorders, preferably those according to Table 2 (most preferably lung carcinoma). The method has utility for the improved detection and diagnosis of said disease.

[0016] Preferably, the source of the test sample is selected from the group consisting of cells or cell lines, histological slides, biopsies, paraffin-embedded tissue, body fluids, ejaculate, urine, blood plasma, blood serum, whole blood, isolated blood cells, sputum and biological matter (such as body fluids or cells) derived from the oral epithelium or from the lung, for example as a result of bronchoscopy (including but not limited to bronchial lavage, bronchial alveolar lavage, bronchial brushing, bronchial abrasion) and combinations thereof. More preferably the sample type is selected from the group consisting of blood plasma, sputum, oral epithelium and biological matter derived from the lung, preferably derived from bronchoscopy (including but not limited to bronchial lavage, bronchial alveolar lavage, bronchial brushing, bronchial abrasion) and all possible combinations thereof.

[0017] Specifically, the present invention provides a method for detecting cell proliferative disorders, preferably those according to Table 2 (most preferably lung carcinoma) suitable for use in a diagnostic tool, comprising: obtaining a biological sample comprising genomic nucleic acid(s); contacting the nucleic acid(s), or a fragment thereof, with a reagent or a plurality of reagents sufficient for distinguishing between methylated and non methylated CpG dinucleotide sequences within a target sequence of the subject nucleic acid, wherein the target sequence comprises, or hybridises under stringent conditions to, a sequence comprising at least 16 contiguous nucleotides of SEQ ID NO: 1 to SEQ ID NO: 12; SEQ ID NO: 79 to SEQ ID NO: 83 or SEQ ID NO: 119 to SEQ ID NO: 125 said contiguous nucleotides comprising at least one CpG dinucleotide sequence; and determining, based at least in part on said distinguishing, the methylation state of at least one CpG dinucleotide within said target sequence, or an average, or a value reflecting an average methylation state of a plurality of CpG dinucleotides within said target sequence of the subject nucleic acid, wherein the target sequence comprises, or hybridises under stringent conditions to a sequence comprising at least 16 contiguous nucleotides of SEQ ID NO: 1 to SEQ ID NO: 12; SEQ ID NO: 79 to SEQ ID NO: 83 or SEQ ID NO: 119 to SEQ ID NO: 125 said contiguous nucleotides comprising at least one CpG dinucleotide sequence.

[0018] Preferably, distinguishing between methylated and non methylated CpG dinucleotide sequences within the target sequence comprises methylation state-dependent conversion or non-conversion of at least one such CpG dinucleotide sequence to the corresponding converted or non-converted dinucleotide sequence within a sequence selected from the group consisting of SEQ ID NO: 13 to SEQ ID NO: 60; SEQ ID NO: 84 to SEQ ID NO: 103, SEQ ID NO: 126 to SEQ ID NO: 153, and contiguous regions thereof corresponding to the target sequence.

[0019] Additional embodiments provide a method for the detection of cell proliferative disorders, preferably those according to Table 2 (most preferably lung carcinoma) comprising: obtaining a biological sample having subject genomic DNA; extracting the genomic DNA; treating the genomic DNA, or a fragment thereof, with one or more reagents to convert 5-position unmethylated cytosine bases to uracil or to another base that is detectably dissimilar to cytosine in terms of hybridization properties; contacting the treated genomic DNA, or the treated fragment thereof, with an amplification enzyme and at least two primers comprising, in each case a contiguous sequence at least 9 nucleotides in length that is complementary to, or hybridizes under moderately stringent or stringent conditions to a sequence selected from the group consisting SEQ ID NO: 13 to SEQ ID NO: 60; SEQ ID NO: 84 to SEQ ID NO: 103, SEQ ID NO: 126 to SEQ ID NO: 153, and complements thereof, wherein the treated DNA or the fragment thereof is either amplified to produce an amplificate, or is not amplified; and determining, based on a presence or absence of, or on a property of said amplificate, the methylation state or an average, or a value reflecting an average of the methylation level of at least one, but more preferably a plurality of CpG dinucleotides of SEQ ID NO: 1 to SEQ ID NO: 12; SEQ ID NO: 79 to SEQ ID NO: 83 and SEQ ID NO: 119 to SEQ ID NO: 125.

[0020] Preferably, determining comprises use of at least one method selected from the group consisting of: i) hybridizing at least one nucleic acid molecule comprising a contiguous sequence at least 9 nucleotides in length that is complementary to, or hybridizes under moderately stringent or stringent conditions to a sequence selected from the group consisting of SEQ ID NO: 13 to SEQ ID NO: 60; SEQ ID NO: 84 to SEQ ID NO: 103, SEQ ID NO: 126 to SEQ ID NO: 153, and complements thereof; ii) hybridizing at least one nucleic acid molecule, bound to a solid phase, comprising a contiguous sequence at least 9 nucleotides in length that is complementary to, or hybridizes under moderately stringent or stringent conditions to a sequence selected from the group consisting of SEQ ID NO: 13 to SEQ ID NO: 60; SEQ ID NO: 84 to SEQ ID NO: 103, SEQ ID NO: 126 to SEQ ID NO: 153 and complements thereof; iii) hybridizing at least one nucleic acid molecule comprising a contiguous sequence at least 9 nucleotides in length that is complementary to, or hybridizes under moderately stringent or stringent conditions to a sequence selected from the group consisting of SEQ ID NO: 13 to SEQ ID NO: 60; SEQ ID NO: 84 to SEQ ID NO: 103, SEQ ID NO: 126 to SEQ ID NO: 153, and complements thereof, and extending at least one such hybridized nucleic acid molecule by at least one nucleotide base; and iv) sequencing of the amplificate.

[0021] Further embodiments provide a method for the analysis (i.e. detection or diagnosis) of cell proliferative disorders, preferably those according to Table 2 (most preferably lung carcinoma), comprising: obtaining a biological sample having subject genomic DNA; extracting the genomic DNA; contacting the genomic DNA, or a fragment thereof, comprising one or more sequences selected from the group consisting of SEQ ID NO: 1 to SEQ ID NO: 12; SEQ ID NO: 79 to SEQ ID NO: 83 and SEQ ID NO: 119 to SEQ ID NO: 125 or a sequence that hybridizes under stringent conditions thereto, with one or more methylation-sensitive restriction enzymes, wherein the genomic DNA is either digested thereby to produce digestion fragments, or is not digested thereby; and determining, based on a presence or absence of, or on property of at least one such fragment, the methylation state of at least one CpG dinucleotide sequence of SEQ ID NO: 1 to SEQ ID NO: 12; SEQ ID NO: 79 to SEQ ID NO: 83 and SEQ ID NO: 119 to SEQ ID NO: 125 or an average, or a value reflecting an average methylation state of a plurality of CpG dinucleotide sequences thereof. Preferably, the digested or undigested genomic DNA is amplified prior to said determining.

[0022] Additional embodiments provide novel genomic and chemically modified nucleic acid sequences, as well as oligonucleotides and/or PNA-oligomers for analysis of cytosine methylation patterns within SEQ ID NO: 1 to SEQ ID NO: 12; SEQ ID NO: 79 to SEQ ID NO: 83 and SEQ ID NO: 119 to SEQ ID NO: 125.

[0023] Additional embodiments provide novel analytical assays, as well as specific favourable combinations of primers and blockers or primers and probes, resulting in especially well performing diagnostic or analytical tests.

### BRIEF SUMMARY OF THE DRAWINGS

[0024] No drawings are deemed necessary in view of the sufficiency of the disclosure provided herein.

### DETAILED DESCRIPTION OF THE INVENTION

### Definitions

[0025] The term “Observed/Expected Ratio” (“O/E Ratio”) refers to the frequency of CpG dinucleotides within a particular DNA sequence, and corresponds to the [number of CpG sites/(number of C bases×number of G bases)]/band length for each fragment.

[0026] The term “CpG island” refers to a contiguous region of genomic DNA that satisfies the criteria of (1) having a frequency of CpG dinucleotides corresponding to an “Observed/Expected Ratio”>0.6, and (2) having a “GC Content”>0.5. CpG islands are typically, but not always, between about 0.2 to about 1 KB, or to about 2 kb in length.

[0027] The term “methylation state” or “methylation status” refers to the presence or absence of 5-methylcytosine (“5-mCyt”) at one or a plurality of CpG dinucleotides within a DNA sequence. Methylation states at one or more particular CpG methylation sites (each having two CpG dinucleotide sequences) within a DNA sequence include “unmethylated,” “fully-methylated” and “hemi-methylated.”

[0028] The term “hemi-methylation” or “hemimethylation” refers to the methylation state of a double stranded DNA wherein only one strand thereof is methylated.

[0029] The term ‘AUC’ as used herein is an abbreviation for the area under a curve. In particular it refers to the area under a Receiver Operating Characteristic (ROC) curve. The ROC curve is a plot of the true positive rate against the false positive rate for the different possible cut points of a diagnostic test. It shows the trade-off between sensitivity and specificity depending on the selected cut point (any increase in sensitivity will be accompanied by a decrease in specificity). The area under an ROC curve (AUC) is a measure for the accuracy of a diagnostic test (the larger the area the better, optimum is 1, a random test would have a ROC curve lying on the diagonal with an area of 0.5; for reference: J. P. Egan. Signal Detection Theory and ROC Analysis, Academic Press, New York, 1975).

[0030] The term “microarray” refers broadly to both “DNA microarrays,” and ‘DNA chip(s),’ as recognized in the art, encompasses all art-recognized solid supports, and encompasses all methods for affixing nucleic acid molecules thereto or synthesis of nucleic acids thereon.

[0031] “Genetic parameters” are mutations and polymorphisms of genes and sequences further required for their regulation. To be designated as mutations are, in particular, insertions, deletions, point mutations, inversions and polymorphisms and, particularly preferred, SNPs (single nucleotide polymorphisms).

[0032] “Epigenetic parameters” are, in particular, cytosine methylation. Further epigenetic parameters include, for example, the acetylation of histones which, however, cannot be directly analysed using the described method but which, in turn, correlate with the DNA methylation.

[0033] The term “bisulfite reagent” refers to a reagent comprising bisulfite, disulfite, hydrogen sulfite or combinations thereof, useful as disclosed herein to distinguish between methylated and unmethylated CpG dinucleotide sequences.

[0034] The term “Methylation assay” refers to any assay for determining the methylation state or methylation level of one or more CpG dinucleotide sequences within a sequence of DNA.

[0035] The term “MS.AP-PCR” (Methylation-Sensitive Arbitrarily-Primed Polymerase Chain Reaction) refers to the art-recognized technology that allows for a global scan of the genome using CG-rich primers to focus on the regions most likely to contain CpG dinucleotides, and described by Gonzalgo et al., Cancer Research 57:594-599, 1997.

[0036] The term “MethyLight™” refers to the art-recognized fluorescence-based real-time PCR technique described by Eads et al., Cancer Res. 59:2302-2306, 1999.

[0037] The term “HeavyMethyl™” assay, in the embodiment thereof implemented herein, refers to an assay, wherein methylation specific blocking probes (also referred to herein as blockers) covering CpG positions between, or covered by the amplification primers enable methylation-specific selective amplification of a nucleic acid sample.

[0038] The term “HeavyMethyl™ MethyLight™” assay, in the embodiment thereof implemented herein, refers to a HeavyMethyl™ MethyLight™ assay, which is a variation of the MethyLight™ assay, wherein the MethyLight™ assay is combined with methylation specific blocking probes covering CpG positions between the amplification primers.

[0039] The term “Ms-SNuPE” (Methylation-sensitive Single Nucleotide Primer Extension) refers to the art-recognized assay described by Gonzalgo & Jones, Nucleic Acids Res. 25:2529-2531, 1997.

[0040] The term “MSP” (Methylation-specific PCR) refers to the art-recognized methylation assay described by Herman et al. Proc. Natl. Acad. Sci. USA 93:9821-9826, 1996, and by U.S. Pat. No. 5,786,146.

[0041] The term “COBRA” (Combined Bisulfite Restriction Analysis) refers to the art-recognized methylation assay described by Xiong & Laird, Nucleic Acids Res. 25:2532-2534, 1997.

[0042] The term “MCA” (Methylated CpG Island Amplification) refers to the methylation assay described by Toyota et al., Cancer Res. 59:2307-12, 1999, and in WO 00/26401 A1.

[0043] The term “hybridisation” is to be understood as a bond of an oligonucleotide to a complementary sequence along the lines of the Watson-Crick base pairings in the sample DNA, forming a duplex structure.

[0044] “Stringent hybridisation conditions,” as defined herein, involve hybridising at 68° C. in 5×SSC/5×Denhardt's solution/1.0% SDS, and washing in 0.2×SSC/0.1% SDS at room temperature, or involve the art-recognized equivalent thereof (e.g., conditions in which a hybridisation is carried out at 60° C. in 2.5×SSC buffer, followed by several washing steps at 37° C. in a low buffer concentration, and remains stable). Moderately stringent conditions, as defined herein, involve including washing in 3×SSC at 42° C., or the art-recognized equivalent thereof. The parameters of salt concentration and temperature can be varied to achieve the optimal level of identity between the probe and the target nucleic acid. Guidance regarding such conditions is available in the art, for example, by Sambrook et al., 1989, Molecular Cloning, A Laboratory Manual, Cold Spring Harbor Press, N.Y.; and Ausubel et al. (eds.), 1995, Current Protocols in Molecular Biology, (John Wiley & Sons, N.Y.) at Unit 2.10.

[0045] The terms “Methylation-specific restriction enzymes” or “methylation-sensitive restriction enzymes” shall be taken to mean an enzyme that selectively digests a nucleic acid depending on the methylation state of its recognition site. In such cases, restriction enzymes, specific for digesting either unmethylated or hemimethylated sites, will either not cut or cut with significantly reduced efficiency the methylated recognition site. In the case of such restriction enzymes which specifically cut if the recognition site is methylated, the cut will not take place, or with a significantly reduced efficiency if the recognition site is not methylated. Preferred are methylation-specific restriction enzymes, the recognition sequence of which contains a CG dinucleotide (for instance cgcg or cccggg). Further preferred for some embodiments are restriction enzymes that do not cut if the cytosine in this dinucleotide is methylated at the carbon atom C5.

[0046] “Non-methylation-specific restriction enzymes” or “non-methylation-sensitive restriction enzymes” are restriction enzymes that cut a nucleic acid sequence irrespective of the methylation state with nearly identical efficiency. They are also called “methylation-unspecific restriction enzymes.”

[0047] The term “at least one gene or genomic sequence selected from the group consisting of PTGER4; RUNX1; EVX2; EVX-1; SHOX2; SEQ ID NO: 6; CN027; LRAT; IL-12RB1; TFAP2C; BCL2; ARIDA5A (SEQ ID NO: 12); EN2; PRDM14; SEQ ID NO: 81; ARID5A (SEQ ID NO: 82); VAX1; ONECUT1; FOXL-2, TFAP2E and BARHL2; EN2-2, EN2-3 and SHOX2-2 shall be taken to include any transcript variant thereof. Furthermore as a plurality of SNPs are known within said genes the term shall be taken to include all sequence variants thereof.

[0048] The sample types which may be analysed with any of the methods according to the invention may be any from the group comprising cells or cell lines, histological slides, biopsies, paraffin-embedded tissue, body fluids, ejaculate, urine, blood plasma, blood serum, whole blood, isolated blood cells, sputum and biological matter (such as body fluids or cells) derived from the oral epithelium or from the lung, for example as a result of bronchoscopy (including but not limited to bronchial lavage, bronchial alveolar lavage, bronchial brushing, bronchial abrasion, and combinations thereof. More preferably the sample type is selected from the group consisting of blood plasma, sputum and biological matter (such as body fluids or cells) derived from the oral epithelium or from the lung, for example as a result of bronchoscopy (including but not limited to bronchial lavage, bronchial alveolar lavage, bronchial brushing, bronchial abrasion) and all possible combinations thereof.

[0049] The sample types, which may be analysed with any of the methods according to the invention preferably, belong to the group of fluids, which are derived from the bloodstream.

[0050] The sample types, which may be analysed with any of the methods according to the invention also preferably, belong to the group of biological samples derived from the lung or the oral epithelium. The term “biological samples derived from the lung” shall comprise fluids and/or cells obtained from the bronchial system of the lung. Such biological samples derived from the lung may be taken from a subject (e.g. a patient) without adding an external fluid, in which case typical sample types are sputum, tracheal or bronchial fluid, exhaled fluid, brushings or biopsies. Such fluids from the bronchial system however may also be taken after adding or rinsing with external fluid, in which case the typical sample would be e.g. induced sputum, bronchial lavage or bronchioalveolar lavage. Such biological samples derived from the lung may be taken by use of instruments (suction catheters, bronchoscope, brushes, forceps, Water absorbing trap) or without using instruments. The method may also be employed to analyse DNA already obtained from any such material.

[0051] The bronchial system (also called “airways”) is to be understood as the system of organs involved in the intake and exchange of air (especially oxygen and carbon dioxide) between an organism and the environment, e.g. trachea, bronchi, bronchioles, alveolar duct, alveoli).

[0052] The terms Bronchial lavage (BL) or Bronchioalveolar lavage (BAL) are to be understood as the types of fluids which are collected when the according medical procedures BL and BAL have been performed. BL and BAL are medical procedures in which a bronchoscope is passed through the mouth or nose into the lungs and fluid is squirted into a small part of the lung and then recollected for examination. BL/BAL is typically performed to diagnose lung disease. In particular, BAL is commonly used to diagnose infections in people with immune system problems, pneumonia in people on ventilators, some types of lung cancer, and scarring of the lung (interstitial lung disease). BAL is the most common manner to sample the components of the epithelial lining fluid (ELF) and to determine the protein composition of the pulmonary airways, and it is often used in immunological research as a means of sampling cells or pathogen levels in the lung. Examples of these include T-cell populations and influenza viral levels.

[0053] BL and BAL differ in the area (segment) of the bronchial system rinsed and the amount of fluid used:
[0054] BL focusses on the bronchi using approximately 10 ml of fluid
[0055] BAL reaches further towards bronchioli and alveolar ducts using a higher amount of fluid (about 100 ml)

[0056] The term Bronchoscopy is understood to comprise a medical test to view the airways and diagnose lung disease. It may also be used during the treatment of some lung conditions.

[0057] Biological samples derived from the lung may also be achieved with a suction catheter for the trachea and the bronchial system, for example tubular, flexible suction catheter may be used for insertion into the trachea and the bronchial system, containing at least one continuous lumen for suction of fluids from the lungs.

[0058] The term lung carcinoma shall be taken to comprise lung adenocarcinoma; large cell lung cancer; squamous cell lung carcinoma and small cell lung carcinoma, as well as other forms of rare carcinoma types, which may be identified in a tumor which is located in the lung, whenever the specification refers to detection of lung carcinoma or diagnosis of lung carcinoma.

[0059] The term “methylation” is meant to be understood as cytosine methylation or CpG methylation. These terms are used to describe methylation at the C5 atom of the cytosine within a CpG context.

### Overview:

[0060] The present invention provides a method for detecting cell proliferative disorders, preferably those according to Table 2 (most preferably lung carcinoma) in a subject comprising determining the expression or methylation levels of at least one gene or genomic sequence selected from the group consisting of PTGER4; RUNX1; EVX2; EVX-1; SHOX2; SEQ ID NO: 6; CN027; LRAT; IL-12RB1; TFAP2C; BCL2; ARIDA5A (SEQ ID NO: 12); EN2; PRDM14; SEQ ID NO: 81; ARID5A (SEQ ID NO: 82); VAX1; ONECUT1; FOXL-2, TFAP2E and BARHL2 (including promoter or regulatory elements thereof) and EN2-2, EN2-3 and SHOX2-2 in a biological sample isolated from said subject wherein hyper-methylation and/or under-expression is indicative of the presence of said disorder. Said markers may be used for the diagnosis of cell proliferative disorders, preferably those according to Table 2 (most preferably lung carcinoma).

[0061] Bisulfite modification of DNA is an art-recognized tool used to assess CpG methylation status. 5-methylcytosine is the most frequent covalent base modification in the DNA of eukaryotic cells. It plays a role, for example, in the regulation of the transcription, in genetic imprinting, and in tumorigenesis. Therefore, the identification of 5-methylcytosine as a component of genetic information is of considerable interest. However, 5-methylcytosine positions cannot be identified by sequencing, because 5-methylcytosine has the same base pairing behavior as cytosine. Moreover, the epigenetic information carried by 5-methylcytosine is completely lost during, e.g., PCR amplification.

[0062] The most frequently used method for analyzing DNA for the presence of 5-methylcytosine is based upon the specific reaction of bisulfite with cytosine whereby, upon subsequent alkaline hydrolysis, cytosine is converted to uracil which corresponds to thymine in its base pairing behavior. Significantly, however, 5-methylcytosine remains unmodified under these conditions. Consequently, the original DNA is converted in such a manner that methylcytosine, which originally could not be distinguished from cytosine by its hybridization behavior, can now be detected as the only remaining cytosine using standard, art-recognized molecular biological techniques, for example, by amplification and hybridization, or by sequencing. All of these techniques are based on differential base pairing properties, which can now be fully exploited.

[0063] The prior art, in terms of sensitivity, is defined by a method comprising enclosing the DNA to be analysed in an agarose matrix, thereby preventing the diffusion and renaturation of the DNA (bisulfite only reacts with single-stranded DNA), and replacing all precipitation and purification steps with fast dialysis (Olek A, et al., A modified and improved method for bisulfite based cytosine methylation analysis, Nucleic Acids Res. 24:5064-6, 1996). It is thus possible to analyse individual cells for methylation status, illustrating the utility and sensitivity of the method. An overview of art-recognized methods for detecting 5-methylcytosine is provided by Rein, T., et al., Nucleic Acids Res., 26:2255, 1998.

[0064] The bisulfite technique, barring few exceptions (e.g., Zeschnigk M, et al., Eur J Hum Genet. 5:94-98, 1997), is currently only used in research. In all instances, short, specific fragments of a known gene are amplified subsequent to a bisulfite treatment, and either completely sequenced (Olek & Walter, Nat. Genet. 1997 17:275-6, 1997), subjected to one or more primer extension reactions (Gonzalgo & Jones, Nucleic Acids Res., 25:2529-31, 1997; WO 95/00669; U.S. Pat. No. 6,251,594) to analyse individual cytosine positions, or treated by enzymatic digestion (Xiong & Laird, Nucleic Acids Res., 25:2532-4, 1997). Detection by hybridisation has also been described in the art (Olek et al., WO 99/28498). Additionally, use of the bisulfite technique for methylation detection with respect to individual genes has been described (Grigg & Clark, Bioessays, 16:431-6, 1994; Zeschnigk M, et al., Hum Mol Genet, 6:387-95, 1997; Feil R, et al., Nucleic Acids Res., 22:695-, 1994; Martin V, et al., Gene, 157:261-4, 1995; WO 9746705 and WO 9515373).

[0065] The present invention provides for the use of the bisulfite technique, in combination with one or more methylation assays, for determination of the methylation status of CpG dinucleotide sequences within SEQ ID NO: 1 to SEQ ID NO: 12; SEQ ID NO: 79 to SEQ ID NO: 83 and SEQ ID NO: 119 to SEQ ID NO: 125. Genomic CpG dinucleotides can be methylated or unmethylated (alternatively known as up- and down-methylated respectively). However the methods of the present invention are suitable for the analysis of biological samples of a heterogeneous nature e.g. a low concentration of tumor cells within a background of body fluid analyte, such as for example biological samples derived from the lung, such as sputum or bronchial lavage or bronchioalveolar lavage. Accordingly, when analyzing the methylation status of a CpG position within such a sample the person skilled in the art may use a quantitative assay for determining the level (e.g. percent, fraction, ratio, proportion or degree) of methylation at a particular CpG position as opposed to a methylation state. Accordingly the term methylation status or methylation state should also be taken to mean a value reflecting the degree of methylation at a CpG position, in other words the methylation level. Unless specifically stated the terms “hypermethylated” or “upmethylated” shall be taken to mean a methylation level above that of a specified cut-off point, wherein said cut-off may be a value representing the average or median methylation level for a given population, or is preferably an optimized cut-off level. The “cut-off” is also referred herein as a “threshold”. In the context of the present invention the terms “methylated”, “hypermethylated” or “upmethylated” shall be taken to include a methylation level above the cut-off be zero (0) % (or equivalents thereof) methylation for all CpG positions within and associated with (e.g. in promoter or regulatory regions) at least one gene or genomic sequence selected from the group consisting of PTGER4; RUNX1; EVX2; EVX-1; SHOX2; SEQ ID NO: 6; CN027; LRAT; IL-12RB1; TFAP2C; BCL2; ARIDA5A (SEQ ID NO: 12); EN2; PRDM14; SEQ ID NO: 81; ARID5A (SEQ ID NO: 82); VAX1; ONECUT1; FOXL-2, TFAP2E and BARHL2 (including promoter or regulatory elements thereof) and EN2-2, EN2-3 and SHOX2-2.

[0066] According to the present invention, determination of the methylation status of CpG dinucleotide sequences within SEQ ID NO: 1 to SEQ ID NO: 12; SEQ ID NO: 79 to SEQ ID NO: 83 and SEQ ID NO: 119 to SEQ ID NO: 125 have utility in the diagnosis and detection of cell proliferative disorders, preferably those according to Table 2 (most preferably lung carcinoma).

[0067] Methylation Assay Procedures. Various methylation assay procedures are known in the art, and can be used in conjunction with the present invention. These assays allow for determination of the methylation state of one or a plurality of CpG dinucleotides (e.g., CpG islands) within a DNA sequence. Such assays involve, among other techniques, DNA sequencing of bisulfite-treated DNA, PCR (for sequence-specific amplification), Southern blot analysis, and use of methylation-sensitive restriction enzymes.

[0068] For example, genomic sequencing has been simplified for analysis of DNA methylation patterns and 5-methylcytosine distribution by using bisulfite treatment (Frommer et al., Proc. Natl. Acad. Sci. USA 89:1827-1831, 1992). Additionally, restriction enzyme digestion of PCR products amplified from bisulfite-converted DNA is used, e.g., the method described by Sadri & Hornsby (Nucl. Acids Res. 24:5058-5059, 1996), or COBRA (Combined Bisulfite Restriction Analysis) (Xiong & Laird, Nucleic Acids Res. 25:2532-2534, 1997).

[0069] COBRA. COBRA™ analysis is a quantitative methylation assay useful for determining DNA methylation levels at specific gene loci in small amounts of genomic DNA (Xiong & Laird, Nucleic Acids Res. 25:2532-2534, 1997). Briefly, restriction enzyme digestion is used to reveal methylation-dependent sequence differences in PCR products of sodium bisulfite-treated DNA. Methylation-dependent sequence differences are first introduced into the genomic DNA by standard bisulfite treatment according to the procedure described by Frommer et al. (Proc. Natl. Acad. Sci. USA 89:1827-1831, 1992). PCR amplification of the bisulfite converted DNA is then performed using primers specific for the CpG islands of interest, followed by restriction endonuclease digestion, gel electrophoresis, and detection using specific, labeled hybridization probes. Methylation levels in the original DNA sample are represented by the relative amounts of digested and undigested PCR product in a linearly quantitative fashion across a wide spectrum of DNA methylation levels. In addition, this technique can be reliably applied to DNA obtained from microdissected paraffin-embedded tissue samples.

[0070] Typical reagents (e.g., as might be found in a typical COBRA™-based kit) for COBRA™ analysis may include, but are not limited to: PCR primers for specific gene (or bisulfite treated DNA sequence or CpG island); restriction enzyme and appropriate buffer; gene-hybridization oligonucleotide; control hybridization oligonucleotide; kinase labeling kit for oligonucleotide probe; and labeled nucleotides. Additionally, bisulfite conversion reagents may include: DNA denaturation buffer; sulfonation buffer; DNA recovery reagents or kits (e.g., precipitation, ultrafiltration, affinity column); desulfonation buffer; and DNA recovery components.

[0071] Preferably, assays such as “MethyLight™” (a fluorescence-based real-time PCR technique) (Eads et al., cell proliferative disorders, preferably those according to Cancer Res. 59:2302-2306, 1999), Ms-SNuPE™ (Methylation-sensitive Single Nucleotide Primer Extension) reactions (Gonzalgo & Jones, Nucleic Acids Res. 25:2529-2531, 1997), methylation-specific PCR (“MSP”; Herman et al., Proc. Natl. Acad. Sci. USA 93:9821-9826, 1996; U.S. Pat. No. 5,786,146), and methylated CpG island amplification (“MCA”; Toyota et al., cell proliferative disorders, preferably those according to Cancer Res. 59:2307-12, 1999) are used alone or in combination with other of these methods.

[0072] The “HeavyMethyl™” assay, technique is a quantitative method for assessing methylation differences based on methylation specific amplification of bisulfite treated DNA. Methylation specific blocking probes (also referred to herein as blockers) covering CpG positions between, or covered by the amplification primers enable methylation-specific selective amplification of a nucleic acid sample.

[0073] The term “HeavyMethyl™ MethyLight™” assay, in the embodiment thereof implemented herein, refers to a HeavyMethyl™ MethyLight™ assay, which is a variation of the MethyLight™ assay, wherein the MethyLight™ assay is combined with methylation specific blocking probes covering CpG positions between the amplification primers. The HeavyMethyl™ assay may also be used in combination with methylation specific amplification primers.

[0074] Typical reagents (e.g., as might be found in a typical MethyLight□-based kit) for HeavyMethyl™ analysis may include, but are not limited to: PCR primers for specific genes (or bisulfite treated DNA sequence or CpG island); blocking oligonucleotides; optimized PCR buffers and deoxynucleotides; and Taq polymerase.

[0075] MSP. MSP (methylation-specific PCR) allows for assessing the methylation status of virtually any group of CpG sites within a CpG island, independent of the use of methylation-sensitive restriction enzymes (Herman et al. Proc. Natl. Acad. Sci. USA 93:9821-9826, 1996; U.S. Pat. No. 5,786,146). Briefly, DNA is modified by sodium bisulfite converting all unmethylated, but not methylated cytosines to uracil, and subsequently amplified with primers specific for methylated versus unmethylated DNA. MSP requires only small quantities of DNA, is sensitive to 0.1% methylated alleles of a given CpG island locus, and can be performed on DNA extracted from paraffin-embedded samples. Typical reagents (e.g., as might be found in a typical MSP-based kit) for MSP analysis may include, but are not limited to: methylation-specific and unmethylation-specific PCR primers for specific gene(s) (or bisulfite treated DNA sequence or CpG island), optimized PCR buffers and deoxynucleotides, and specific probes.

[0076] MethyLight™. The MethyLight™ assay is a high-throughput quantitative methylation assay that utilizes fluorescence-based real-time PCR (TaqMan™) technology that requires no further manipulations after the PCR step (Eads et al., Cancer Res. 59:2302-2306, 1999). Briefly, the MethyLight™ process begins with a mixed sample of genomic DNA that is converted, in a sodium bisulfite reaction, to a mixed pool of methylation-dependent sequence differences according to standard procedures (the bisulfite process converts unmethylated cytosine residues to uracil). Fluorescence-based PCR is then performed in a “biased” (with PCR primers that overlap known CpG dinucleotides) reaction. Sequence discrimination can occur both at the level of the amplification process and at the level of the fluorescence detection process.

[0077] The MethyLight™ assay may be used as a quantitative test for methylation patterns in the genomic DNA sample, wherein sequence discrimination occurs at the level of probe hybridization. In this quantitative version, the PCR reaction provides for a methylation specific amplification in the presence of a fluorescent probe that overlaps a particular putative methylation site. An unbiased control for the amount of input DNA is provided by a reaction in which neither the primers, nor the probe overlie any CpG dinucleotides. Alternatively, a qualitative test for genomic methylation is achieved by probing of the biased PCR pool with either control oligonucleotides that do not “cover” known methylation sites (a fluorescence-based version of the HeavyMethyl™ and MSP techniques), or with oligonucleotides covering potential methylation sites.

[0078] The MethyLight™ process can by used with any suitable probes e.g. “TaqMan®”, Lightcycler® etc . . . . For example, double-stranded genomic DNA is treated with sodium bisulfite and subjected to one of two sets of PCR reactions using TaqMan® probes; e.g., with MSP primers and/or HeavyMethyl blocker oligonucleotides and TaqMan® probe. The TaqMan® probe is dual-labeled with fluorescent “reporter” and “quencher” molecules, and is designed to be specific for a relatively high GC content region so that it melts out at about 100C higher temperature in the PCR cycle than the forward or reverse primers. This allows the TaqMan® probe to remain fully hybridized during the PCR annealing/extension step. As the Taq polymerase enzymatically synthesizes a new strand during PCR, it will eventually reach the annealed TaqMan® probe. The Taq polymerase 5′ to 3′ endonuclease activity will then displace the TaqMan® probe by digesting it to release the fluorescent reporter molecule for quantitative detection of its now unquenched signal using a real-time fluorescent detection system.

[0079] Typical reagents (e.g., as might be found in a typical MethyLight-based kit) for MethyLight™ analysis may include, but are not limited to: PCR primers for specific gene (or bisulfite treated DNA sequence or CpG island); TaqMan® or Lightcycler® probes; optimized PCR buffers and deoxynucleotides; and Taq polymerase.

[0080] TSP Method. The method was performed as described in the application EP 08159227.1 (see p 29-28, under Examples). In brief, the DNA restriction enzyme Tsp509I is used instead of the blocking oligonucleotides. This enzyme specifically cuts unmethylated DNA during amplification after bisulfite-treatment. As a result, unmethylated DNA is prevented from being amplified.

[0081] The QM™ (quantitative methylation) assay is an alternative quantitative test for methylation patterns in genomic DNA samples, wherein sequence discrimination occurs at the level of probe hybridization. In this quantitative version, the PCR reaction provides for unbiased amplification in the presence of a fluorescent probe that overlaps a particular putative methylation site. An unbiased control for the amount of input DNA is provided by a reaction in which neither the primers, nor the probe overlie any CpG dinucleotides. Alternatively, a qualitative test for genomic methylation is achieved by probing of the biased PCR pool with either control oligonucleotides that do not “cover” known methylation sites (a fluorescence-based version of the HeavyMethyl™ and MSP techniques), or with oligonucleotides covering potential methylation sites.

[0082] The QM™ process can by used with any suitable probes e.g. “TaqMan®”, Lightcycler®, Scorpion® probes etc. in the amplification process. For example, double-stranded genomic DNA is treated with sodium bisulfite and subjected to unbiased primers and the TaqMan® probe. The TaqMan® probe is dual-labeled with fluorescent “reporter” and “quencher” molecules, and is designed to be specific for a relatively high GC content region so that it melts out at about 10° C. higher temperature in the PCR cycle than the forward or reverse primers. This allows the TaqMan® probe to remain fully hybridized during the PCR annealing/extension step. As the Taq polymerase enzymatically synthesizes a new strand during PCR, it will eventually reach the annealed TaqMan® probe. The Taq polymerase 5′ to 3′ endonuclease activity will then displace the TaqMan® probe by digesting it to release the fluorescent reporter molecule for quantitative detection of its now unquenched signal using a real-time fluorescent detection system.

[0083] The Scorpion technique (generally described in patent application EP 9812768.1 has been adapted for the analysis of CpG methylation as described in detail within the published US application US 2006-0194208, which is incorporated by reference herein for this purpose.

[0084] Typical reagents (e.g., as might be found in a typical QM™-based kit) for QM™ analysis may include, but are not limited to: PCR primers for specific gene (or bisulfite treated DNA sequence or CpG island); TaqMan® or Lightcycler® probes; optimized PCR buffers and deoxynucleotides; and Taq polymerase.

[0085] Ms-SNuPE. The Ms-SNuPE™ technique is a quantitative method for assessing methylation differences at specific CpG sites based on bisulfite treatment of DNA, followed by single-nucleotide primer extension (Gonzalgo & Jones, Nucleic Acids Res. 25:2529-2531, 1997). Briefly, genomic DNA is reacted with sodium bisulfite to convert unmethylated cytosine to uracil while leaving 5-methylcytosine unchanged. Amplification of the desired target sequence is then performed using PCR primers specific for bisulfite-converted DNA, and the resulting product is isolated and used as a template for methylation analysis at the CpG site(s) of interest. Small amounts of DNA can be analyzed (e.g., microdissected pathology sections), and it avoids utilization of restriction enzymes for determining the methylation status at CpG sites.

[0086] Typical reagents (e.g., as might be found in a typical Ms-SNuPE™-based kit) for Ms-SNuPE™ analysis may include, but are not limited to: PCR primers for specific gene (or bisulfite treated DNA sequence or CpG island); optimized PCR buffers and deoxynucleotides; gel extraction kit; positive control primers; Ms-SNuPE™ primers for specific gene; reaction buffer (for the Ms-SNuPE reaction); and labelled nucleotides. Additionally, bisulfite conversion reagents may include: DNA denaturation buffer; sulfonation buffer; DNA recovery regents or kit (e.g., precipitation, ultrafiltration, affinity column); desulfonation buffer; and DNA recovery components.

The genomic sequence(s) according to SEQ ID NO: 1 to SEQ ID NO: 12; SEQ ID NO: 79 to SEQ ID NO: 83 AND SEQ ID NO: 119 TO SEQ ID NO: 125 and non-naturally occurring treated variants thereof according to SEQ ID NO: 13 to SEQ ID NO: 60; SEQ ID NO: 84 to SEQ ID NO: 103 SEQ ID NO: 126 TO SEQ ID NO: 153 were determined to have novel utility for the detection of cell proliferative disorders preferably those according to Table 2 (most preferably lung carcinoma). This utility has been exemplified in the specific assays described within the specification especially in the examples.

[0087] In one embodiment the method of the invention comprises the following steps: i) determining the expression of at least one gene or genomic sequence selected from the group consisting of PTGER4; RUNX1; EVX2; EVX-1; SHOX2; SEQ ID NO: 6; CN027; LRAT; IL-12RB1; TFAP2C; BCL2; ARIDA5A (SEQ ID NO: 12); EN2; PRDM14; SEQ ID NO: 81; ARID5A (SEQ ID NO: 82); VAX1; ONECUT1; FOXL-2, TFAP2E and BARHL2 and ii) determining the presence or absence of a subject's risk or increased risk of suffering from a cell proliferative disorder, or detecting a cell proliferative disorder preferably those according to Table 2 (most preferably lung carcinoma). Preferred is the detection of a lung cancer selected from the group consisting of lung adenocarcinoma; large cell lung cancer; squamous cell lung carcinoma and small cell lung carcinoma.

[0088] Certain aspects of the method of the invention may be enabled by means of any analysis of the expression of an RNA transcribed therefrom or polypeptide or protein translated from said RNA, preferably by means of mRNA expression analysis or polypeptide expression analysis. However, in the most preferred embodiment of the invention the detection of cell proliferative disorders, preferably those according to Table 2 (most preferably lung carcinoma), is enabled by means of analysis of the methylation status or methylation level of at least one gene or genomic sequence selected from the group consisting of PTGER4; RUNX1; EVX2; EVX-1; SHOX2; SEQ ID NO: 6; CN027; LRAT; IL-12RB1; TFAP2C; BCL2; ARIDA5A (SEQ ID NO: 12); EN2; PRDM14; SEQ ID NO: 81; ARID5A (SEQ ID NO: 82); VAX1; ONECUT1; FOXL-2, TFAP2E and BARHL2 (including promoter or regulatory elements thereof) and EN2-2, EN2-3 and SHOX2-2.

[0089] Accordingly, particular aspects of the present invention also provides diagnostic assays and methods, both quantitative and qualitative for detecting the expression of at least one gene or genomic sequence selected from the group consisting of PTGER4; RUNX1; EVX2; EVX-1; SHOX2; SEQ ID NO: 6; CN027; LRAT; IL-12RB1; TFAP2C; BCL2; ARIDA5A (SEQ ID NO: 12); EN2; PRDM14; SEQ ID NO: 81; ARID5A (SEQ ID NO: 82); VAX1; ONECUT1; FOXL-2, TFAP2E and BARHL2 in a subject and determining therefrom upon the presence or absence of a subject's risk or increased risk to suffer from a cell proliferative disorders, or to detect a cell proliferative disorder preferably those according to Table 2 (most preferably lung carcinoma) in said subject. Particularly preferred is that the cell proliferative disorder is lung cancer and particularly preferred that it is selected from the group consisting of lung adenocarcinoma; large cell lung cancer; squamous cell lung carcinoma and small cell lung carcinoma.

[0090] Aberrant expression of mRNA transcribed from at least one gene or genomic sequence selected from the group consisting of PTGER4; RUNX1; EVX2; EVX-1; SHOX2; SEQ ID NO: 6; CN027; LRAT; IL-12RB1; TFAP2C; BCL2; ARIDA5A (SEQ ID NO: 12); EN2; PRDM14; SEQ ID NO: 81; ARID5A (SEQ ID NO: 82); VAX1; ONECUT1; FOXL-2, TFAP2E and BARHL2 is associated with the presence of cell proliferative disorders, preferably those according to Table 2 (most preferably lung carcinoma) in a subject. Particularly preferred is that the cell proliferative disorder is a lung cancer, preferably a lung cancer selected from the group consisting of lung adenocarcinoma, large cell lung cancer, squamous cell lung carcinoma and small cell lung carcinoma.

[0091] According to particular aspects of the present invention, hyper-methylation and/or under-expression is associated with the presence of cell proliferative disorders, in particular those according to Table 2 (most preferably lung carcinoma).

[0092] To detect the presence of mRNA encoding a gene or genomic sequence, a sample is obtained from a patient. The sample may be any suitable sample comprising cellular matter of the tumor. Suitable sample types include cells or cell lines, histological slides, biopsies, paraffin-embedded tissue, body fluids, ejaculate, urine, blood plasma, blood serum, whole blood, isolated blood cells, sputum and biological matter (such as body fluids or cells) derived from the oral epithelium or from the lung, for example as a result of bronchoscopy (including but not limited to bronchial lavage, bronchial alveolar lavage, bronchial brushing, bronchial abrasion and all possible combinations thereof. More preferably the sample type is selected form the group consisting of blood plasma, sputum and biological matter (such as body fluids or cells) derived from the oral epithelium or from the lung, for example as a result of bronchoscopy (including but not limited to bronchial lavage, bronchial alveolar lavage, bronchial brushing, bronchial abrasion) and all possible combinations thereof.

[0093] The sample may be treated to extract the RNA contained therein. The resulting nucleic acid from the sample is then analysed. Many techniques are known in the state of the art for determining absolute and relative levels of gene expression, commonly used techniques suitable for use in the present invention include in situ hybridisation (e.g. FISH), Northern analysis, RNase protection assays (RPA), microarrays and PCR-based techniques, such as quantitative PCR and differential display PCR or any other nucleic acid detection method.

[0094] Particularly preferred is the use of the reverse transcription/polymerisation chain reaction technique (RT-PCR). The method of RT-PCR is well known in the art (for example, see Watson and Fleming, supra).

[0095] The RT-PCR method can be performed as follows. Total cellular RNA is isolated by, for example, the standard guanidium isothiocyanate method and the total RNA is reverse transcribed. The reverse transcription method involves synthesis of DNA on a template of RNA using a reverse transcriptase enzyme and a 3′ end oligonucleotide dT primer and/or random hexamer primers. The cDNA thus produced is then amplified by means of PCR. (Belyavsky et al, Nucl Acid Res 17:2919-2932, 1989; Krug and Berger, Methods in Enzymology, Academic Press, N.Y., Vol. 152, pp. 316-325, 1987 which are incorporated by reference). Further preferred is the “Real-time” variant of RT-PCR, wherein the PCR product is detected by means of hybridisation probes (e.g. TaqMan, Lightcycler, Molecular Beacons & Scorpion) or SYBR green. The detected signal from the probes or SYBR green is then quantitated either by reference to a standard curve or by comparing the Ct values to that of a calibration standard. Analysis of housekeeping genes is often used to normalize the results.

[0096] In Northern blot analysis total or poly(A)+mRNA is run on a denaturing agarose gel and detected by hybridisation to a labelled probe in the dried gel itself or on a membrane. The resulting signal is proportional to the amount of target RNA in the RNA population. Comparing the signals from two or more cell populations or tissues reveals relative differences in gene expression levels. Absolute quantitation can be performed by comparing the signal to a standard curve generated using known amounts of an in vitro transcript corresponding to the target RNA. Analysis of housekeeping genes, genes whose expression levels are expected to remain relatively constant regardless of conditions, is often used to normalize the results, eliminating any apparent differences caused by unequal transfer of RNA to the membrane or unequal loading of RNA on the gel.

[0097] The first step in Northern analysis is isolating pure, intact RNA from the cells or tissue of interest. Because Northern blots distinguish RNAs by size, sample integrity influences the degree to which a signal is localized in a single band. Partially degraded RNA samples will result in the signal being smeared or distributed over several bands with an overall loss in sensitivity and possibly an erroneous interpretation of the data. In Northern blot analysis, DNA, RNA and oligonucleotide probes can be used and these probes are preferably labelled (e.g. radioactive labels, mass labels or fluorescent labels). The size of the target RNA, not the probe, will determine the size of the detected band, so methods such as random-primed labelling, which generates probes of variable lengths, are suitable for probe synthesis. The specific activity of the probe will determine the level of sensitivity, so it is preferred that probes with high specific activities, are used.

[0098] In an RNase protection assay, the RNA target and an RNA probe of a defined length are hybridised in solution. Following hybridisation, the RNA is digested with RNases specific for single-stranded nucleic acids to remove any unhybridized, single-stranded target RNA and probe. The RNases are inactivated, and the RNA is separated e.g. by denaturing polyacrylamide gel electrophoresis. The amount of intact RNA probe is proportional to the amount of target RNA in the RNA population. RPA can be used for relative and absolute quantitation of gene expression and also for mapping RNA structure, such as intron/exon boundaries and transcription start sites. The RNase protection assay is preferable to Northern blot analysis as it generally has a lower limit of detection.

[0099] The antisense RNA probes used in RPA are generated by in vitro transcription of a DNA template with a defined endpoint and are typically in the range of 50-600 nucleotides. The use of RNA probes that include additional sequences not homologous to the target RNA allows the protected fragment to be distinguished from the full-length probe. RNA probes are typically used instead of DNA probes due to the ease of generating single-stranded RNA probes and the reproducibility and reliability of RNA:RNA duplex digestion with RNases (Ausubel et al. 2003), particularly preferred are probes with high specific activities.

[0100] Particularly preferred is the use of microarrays. The microarray analysis process can be divided into two main parts. First is the immobilization of known gene sequences onto glass slides or other solid support followed by hybridisation of the fluorescently labelled cDNA (comprising the sequences to be interrogated) to the known genes immobilized on the glass slide (or other solid phase). After hybridisation, arrays are scanned using a fluorescent microarray scanner. Analysing the relative fluorescent intensity of different genes provides a measure of the differences in gene expression.

[0101] DNA arrays can be generated by immobilizing presynthesized oligonucleotides onto prepared glass slides or other solid surfaces. In this case, representative gene sequences are manufactured and prepared using standard oligonucleotide synthesis and purification methods. These synthesized gene sequences are complementary to the RNA transcript(s) of at least one gene or genomic sequence selected from the group consisting of PTGER4; RUNX1; EVX2; EVX-1; SHOX2; SEQ ID NO: 6; CN027; LRAT; IL-12RB1; TFAP2C; BCL2; ARIDA5A (SEQ ID NO: 12); EN2; PRDM14; SEQ ID NO: 81; ARID5A (SEQ ID NO: 82); VAX1; ONECUT1; FOXL-2, TFAP2E and BARHL2 and tend to be shorter sequences in the range of 25-70 nucleotides. Alternatively, immobilized oligos can be chemically synthesized in situ on the surface of the slide. In situ oligonucleotide synthesis involves the consecutive addition of the appropriate nucleotides to the spots on the microarray; spots not receiving a nucleotide are protected during each stage of the process using physical or virtual masks. Preferably said synthesized nucleic acids are locked nucleic acids.

[0102] In expression profiling microarray experiments, the RNA templates used are representative of the transcription profile of the cells or tissues under study. RNA is first isolated from the cell populations or tissues to be compared. Each RNA sample is then used as a template to generate fluorescently labelled cDNA via a reverse transcription reaction. Fluorescent labelling of the cDNA can be accomplished by either direct labelling or indirect labelling methods. During direct labelling, fluorescently modified nucleotides (e.g., Cy®3- or Cy®5-dCTP) are incorporated directly into the cDNA during the reverse transcription. Alternatively, indirect labelling can be achieved by incorporating aminoallyl-modified nucleotides during cDNA synthesis and then conjugating an N-hydroxysuccinimide (NHS)-ester dye to the aminoallyl-modified cDNA after the reverse transcription reaction is complete. Alternatively, the probe may be unlabelled, but may be detectable by specific binding with a ligand, which is labelled, either directly or indirectly. Suitable labels and methods for labelling ligands (and probes) are known in the art, and include, for example, radioactive labels which may be incorporated by known methods (e.g., nick translation or kinasing). Other suitable labels include but are not limited to biotin, fluorescent groups, chemiluminescent groups (e.g., dioxetanes, particularly triggered dioxetanes), enzymes, antibodies, and the like.

[0103] To perform differential gene expression analysis, cDNA generated from different RNA samples are labelled with Cy®3. The resulting labelled cDNA is purified to remove unincorporated nucleotides, free dye and residual RNA. Following purification, the labelled cDNA samples are hybridised to the microarray. The stringency of hybridisation is determined by a number of factors during hybridisation and during the washing procedure, including temperature, ionic strength, length of time and concentration of formamide. These factors are outlined in, for example, Sambrook et al. (Molecular Cloning: A Laboratory Manual, 2nd ed., 1989). The microarray is scanned post-hybridisation using a fluorescent microarray scanner. The fluorescent intensity of each spot indicates the level of expression of the analysed gene; bright spots correspond to strongly expressed genes, while dim spots indicate weak expression.

[0104] Once the images are obtained, the raw data must be analysed. First, the background fluorescence must be subtracted from the fluorescence of each spot. The data is then normalized to a control sequence, such as exogenously added nucleic acids (preferably RNA or DNA), or a housekeeping gene panel to account for any non-specific hybridisation, array imperfections or variability in the array set-up, cDNA labelling, hybridisation or washing. Data normalization allows the results of multiple arrays to be compared.

[0105] Another aspect of the invention relates to a kit for use in diagnosis of cell proliferative disorders, preferably those according to Table 2 (most preferably lung carcinoma and further preferred is a lung cancer selected from the group consisting of lung adenocarcinoma; large cell lung cancer; squamous cell lung carcinoma; small cell lung carcinoma.) in a subject according to the methods of the present invention, said kit comprising: a means for measuring the level of transcription of at least one gene or genomic sequence selected from the group consisting of PTGER4; RUNX1; EVX2; EVX-1; SHOX2; SEQ ID NO: 6; CN027; LRAT; IL-12RB1; TFAP2C; BCL2; ARIDA5A (SEQ ID NO: 12); EN2; PRDM14; SEQ ID NO: 81; ARID5A (SEQ ID NO: 82); VAX1; ONECUT1; FOXL-2, TFAP2E and BARHL2. In a preferred embodiment the means for measuring the level of transcription comprise oligonucleotides or polynucleotides able to hybridise under stringent or moderately stringent conditions to the transcription products of at least one gene or genomic sequence selected from the group consisting of PTGER4; RUNX1; EVX2; EVX-1; SHOX2; SEQ ID NO: 6; CN027; LRAT; IL-12RB1; TFAP2C; BCL2; ARIDA5A (SEQ ID NO: 12); EN2; PRDM14; SEQ ID NO: 81; ARID5A (SEQ ID NO: 82); VAX1; ONECUT1; FOXL-2, TFAP2E and BARHL2 (including promoter or regulatory elements thereof) and EN2-2, EN2-3 and SHOX2-2. In a most preferred embodiment the level of transcription is determined by techniques selected from the group of Northern Blot analysis, reverse transcriptase PCR, real-time PCR, RNAse protection, and microarray. In another embodiment of the invention the kit further comprises means for obtaining a biological sample of the patient. Preferred is a kit, which further comprises a container which is most preferably suitable for containing the means for measuring the level of transcription and the biological sample of the patient, and most preferably further comprises instructions for use and interpretation of the kit results.

[0106] In a preferred embodiment, the kit comprises (a) a plurality of oligonucleotides or polynucleotides able to hybridise under stringent or moderately stringent conditions to the transcription products of at least one gene or genomic sequence selected from the group consisting of PTGER4; RUNX1; EVX2; EVX-1; SHOX2; SEQ ID NO: 6; CN027; LRAT; IL-12RB1; TFAP2C; BCL2; ARIDA5A (SEQ ID NO: 12); EN2; PRDM14; SEQ ID NO: 81; ARID5A (SEQ ID NO: 82); VAX1; ONECUT1; FOXL-2, TFAP2E and BARHL2 (including promoter or regulatory elements thereof) and EN2-2, EN2-3 and SHOX2-2; (b) a container, preferably suitable for containing the oligonucleotides or polynucleotides and a biological sample of the patient comprising the transcription products wherein the oligonucleotides or polynucleotides can hybridise under stringent or moderately stringent conditions to the transcription products, (c) means to detect the hybridisation of (b); and optionally, (d) instructions for use and interpretation of the kit results.

[0107] The kit may also contain other components such as hybridisation buffer (where the oligonucleotides are to be used as a probe) packaged in a separate container. Alternatively, where the oligonucleotides are to be used to amplify a target region, the kit may contain, packaged in separate containers, a polymerase and a reaction buffer optimised for primer extension mediated by the polymerase, such as PCR. Preferably said polymerase is a reverse transcriptase. It is further preferred that said kit further contains an Rnase reagent.

[0108] The present invention further provides for methods for the detection of the presence of the polypeptide encoded by said gene sequences in a sample obtained from a patient.

[0109] Aberrant levels of polypeptide expression of the polypeptides encoded at least one gene or genomic sequence selected from the group consisting of PTGER4; RUNX1; EVX2; EVX-1; SHOX2; SEQ ID NO: 6; CN027; LRAT; IL-12RB1; TFAP2C; BCL2; ARIDA5A (SEQ ID NO: 12); EN2; PRDM14; SEQ ID NO: 81; ARID5A (SEQ ID NO: 82); VAX1; ONECUT1; FOXL-2, TFAP2E and BARHL2 are associated with the presence of cell proliferative disorders, preferably those according to Table 2 (most preferably lung carcinoma). Particularly preferred is a lung cancer selected from the group consisting of lung adenocarcinoma; large cell lung cancer; squamous cell lung carcinoma; small cell lung carcinoma.

[0110] According to the present invention under-expression of said polypeptides is associated with the presence of cell proliferative disorders, preferably those according to Table 2 (most preferably lung carcinoma). It is particularly preferred that the cell proliferative disorder is lung cancer and that it is selected from the group consisting of lung adenocarcinoma; large cell lung cancer; squamous cell lung carcinoma and small cell lung carcinoma.

[0111] Any method known in the art for detecting polypeptides can be used. Such methods include, but are not limited to mass-spectrometry, immunodiffusion, immunoelectrophoresis, immunochemical methods, binder-ligand assays, immunohistochemical techniques, agglutination and complement assays (e.g., see Basic and Clinical Immunology, Sites and Terr, eds., Appleton & Lange, Norwalk, Conn. pp 217-262, 1991 which is incorporated by reference). Preferred are binder-ligand immunoassay methods including reacting antibodies with an epitope or epitopes and competitively displacing a labelled polypeptide or derivative thereof.

[0112] Certain embodiments of the present invention comprise the use of antibodies specific to the polypeptide(s) encoded by at least one gene or genomic sequence selected from the group consisting of PTGER4; RUNX1; EVX2; EVX-1; SHOX2; SEQ ID NO: 6; CN027; LRAT; IL-12RB1; TFAP2C; BCL2; ARIDA5A (SEQ ID NO: 12); EN2; PRDM14; SEQ ID NO: 81; ARID5A (SEQ ID NO: 82); VAX1; ONECUT1; FOXL-2, TFAP2E and BARHL2.

[0113] Such antibodies are useful for cell proliferative disorders, preferably of those diseases according to Table 2, and most preferably in the diagnosis of lung carcinoma. Particularly preferred is a lung cancer selected from the group consisting of lung adenocarcinoma; large cell lung cancer; squamous cell lung carcinoma; small cell lung carcinoma. In certain embodiments production of monoclonal or polyclonal antibodies can be induced by the use of an epitope encoded by a polypeptide of at least one gene or genomic sequence selected from the group consisting of PTGER4; RUNX1; EVX2; EVX-1; SHOX2; SEQ ID NO: 6; CN027; LRAT; IL-12RB1; TFAP2C; BCL2; ARIDA5A (SEQ ID NO: 12); EN2; PRDM14; SEQ ID NO: 81; ARID5A (SEQ ID NO: 82); VAX1; ONECUT1; FOXL-2, TFAP2E and BARHL2 as an antigene. Such antibodies may in turn be used to detect expressed polypeptides as markers for cell proliferative disorders, preferably those according to Table 2 and most preferably the diagnosis of lung carcinoma. Particularly preferred is a lung cancer selected from the group consisting of lung adenocarcinoma; large cell lung cancer; squamous cell lung carcinoma; small cell lung carcinoma. The levels of such polypeptides present may be quantified by conventional methods. Antibody-polypeptide binding may be detected and quantified by a variety of means known in the art, such as labelling with fluorescent or radioactive ligands. The invention further comprises kits for performing the above-mentioned procedures, wherein such kits contain antibodies specific for the investigated polypeptides.

[0114] Numerous competitive and non-competitive polypeptide binding immunoassays are well known in the art. Antibodies employed in such assays may be unlabelled, for example as used in agglutination tests, or labelled for use a wide variety of assay methods. Labels that can be used include radionuclides, enzymes, fluorescers, chemiluminescers, enzyme substrates or co-factors, enzyme inhibitors, particles, dyes and the like. Preferred assays include but are not limited to radioimmunoassay (RIA), enzyme immunoassays, e.g., enzyme-linked immunosorbent assay (ELISA), fluorescent immunoassays and the like. Polyclonal or monoclonal antibodies or epitopes thereof can be made for use in immunoassays by any of a number of methods known in the art.

[0115] In an alternative embodiment of the method the proteins may be detected by means of western blot analysis. Said analysis is standard in the art, briefly proteins are separated by means of electrophoresis e.g. SDS-PAGE. The separated proteins are then transferred to a suitable membrane (or paper) e.g. nitrocellulose, retaining the spacial separation achieved by electrophoresis. The membrane is then incubated with a blocking agent to bind remaining sticky places on the membrane, commonly used agents include generic protein (e.g. milk protein). An antibody specific to the protein of interest is then added, said antibody being detectably labelled for example by dyes or enzymatic means (e.g. alkaline phosphatase or horseradish peroxidase). The location of the antibody on the membrane is then detected.

[0116] In an alternative embodiment of the method the proteins may be detected by means of immunohistochemistry (the use of antibodies to probe specific antigens in a sample). Said analysis is standard in the art, wherein detection of antigens in tissues is known as immunohistochemistry, while detection in cultured cells is generally termed immunocytochemistry. Briefly, the primary antibody is to be detected by binding to its specific antigen. The antibody-antigen complex is then bound by a secondary enzyme-conjugated antibody. In the presence of the necessary substrate and chromogen the bound enzyme is detected according to coloured deposits at the antibody-antigen binding sites. There is a wide range of suitable sample types, antigen-antibody affinity, antibody types, and detection enhancement methods. Thus, optimal conditions for immunohistochemical or immunocytochemical detection must be determined by the person skilled in the art for each individual case.

[0117] One approach for preparing antibodies to a polypeptide is the selection and preparation of an amino acid sequence of all or part of the polypeptide, chemically synthesising the amino acid sequence and injecting it into an appropriate animal, usually a rabbit or a mouse (Milstein and Kohler Nature 256:495-497, 1975; Gulfre and Milstein, Methods in Enzymology: Immunochemical Techniques 73:1-46, Langone and Banatis eds., Academic Press, 1981 which are incorporated by reference in its entirety). Methods for preparation of the polypeptides or epitopes thereof include, but are not limited to chemical synthesis, recombinant DNA techniques or isolation from biological samples.

[0118] In the final step of the method the diagnosis of the patient is determined, whereby under-expression (of mRNA or polypeptides) is indicative of the presence of cell proliferative disorders, preferably those according to Table 2 (most preferably lung carcinoma). Particularly preferred it is a lung cancer, preferably selected from the group consisting of lung adenocarcinoma; large cell lung cancer; squamous cell lung carcinoma and small cell lung carcinoma. The term under-expression shall be taken to mean expression at a detected level less than a pre-determined cut off which may be selected from the group consisting of the mean, median or an optimised threshold value. The term over-expression shall be taken to mean expression at a detected level greater than a pre-determined cut off which may be selected from the group consisting of the mean, median or an optimised threshold value.

[0119] Another aspect of the invention provides a kit for use in diagnosis of cell proliferative disorders, preferably those according to Table 2 (most preferably lung carcinoma) in a subject according to the methods of the present invention, comprising: a means for detecting polypeptides of at least one gene or genomic sequence selected from the group consisting of PTGER4; RUNX1; EVX2; EVX-1; SHOX2; SEQ ID NO: 6; CN027; LRAT; IL-12RB1; TFAP2C; BCL2; ARIDA5A (SEQ ID NO: 12); EN2; PRDM14; SEQ ID NO: 81; ARID5A (SEQ ID NO: 82); VAX1; ONECUT1; FOXL-2, TFAP2E and BARHL2. The means for detecting the polypeptides comprise preferably antibodies, antibody derivatives, or antibody fragments. The polypeptides are most preferably detected by means of Western Blotting utilizing a labelled antibody. In another embodiment of the invention the kit further comprising means for obtaining a biological sample of the patient. Preferred is a kit, which further comprises a container suitable for containing the means for detecting the polypeptides in the biological sample of the patient, and most preferably further comprises instructions for use and interpretation of the kit results. In a preferred embodiment the kit comprises: (a) a means for detecting polypeptides of at least one gene or genomic sequence selected from the group consisting of PTGER4; RUNX1; EVX2; EVX-1; SHOX2; SEQ ID NO: 6; CN027; LRAT; IL-12RB1; TFAP2C; BCL2; ARIDA5A (SEQ ID NO: 12); EN2; PRDM14; SEQ ID NO: 81; ARID5A (SEQ ID NO: 82); VAX1; ONECUT1; FOXL-2, TFAP2E and BARHL2; (b) a container suitable for containing the said means and the biological sample of the patient comprising the polypeptides wherein the means can form complexes with the polypeptides; (c) a means to detect the complexes of (b); and optionally (d) instructions for use and interpretation of the kit results.

[0120] The kit may also contain other components such as buffers or solutions suitable for blocking, washing or coating, packaged in a separate container.

[0121] Particular embodiments of the present invention provide a novel application of the analysis of methylation status, methylation levels and/or patterns within at least one gene or genomic sequence selected from the group consisting of PTGER4; RUNX1; EVX2; EVX-1; SHOX2; SEQ ID NO: 6; CN027; LRAT; IL-12RB1; TFAP2C; BCL2; ARIDA5A (SEQ ID NO: 12); EN2; PRDM14; SEQ ID NO: 81; ARID5A (SEQ ID NO: 82); VAX1; ONECUT1; FOXL-2, TFAP2E and BARHL2 (including promoter or regulatory elements thereof) and EN2-2, EN2-3 and SHOX2-2. that enables a precise detection, characterisation, assessment of risk to suffer from cell proliferative disorders, preferably those according to Table 2 (most preferably lung carcinoma). It is particularly preferred that this lung cancer is selected from the group consisting of lung adenocarcinoma; large cell lung cancer; squamous cell lung carcinoma and small cell lung carcinoma. Early detection of cell proliferative disorders, in particular lung carcinoma, is directly linked with disease prognosis, and the disclosed method thereby enables the physician and patient to make better and more informed treatment decisions. Therefore it is preferred that the method of the invention, which allows detection of disease in an early stage, is performed as a screening tool, or as an additional diagnostic test, whenever a first diagnosis is unclear.

[0122] The preferred sample type used within the method of the invention is sputum or biological samples derived from the lung, preferably, bronchial fluid, bronchial lavage and bronchioalveolar lavage. This sample type has the advantage that it is a sample, which is currently used in common practice and obtainable by established and routine diagnostic procedures of lung disease as part of the standard care (e.g. histology procedures and/or cytology procedures). The advantage of using available samples is that additional information from the same sample can be achieved. The second advantage is, that these samples can be obtained non-invasively (for example sputum) or with low risk to the subject or patient.

[0123] Another important advantage of using samples, which are collected from the bronchial system, is that the marker that can be used for a specific diagnosis of lung cancer or risk assessment of lung cancer may be less specific in terms cancer type. It would not harm, if the same marker is also detecting other cancer types (if tested on other sample types, for example blood).

[0124] In the most preferred embodiment of the method, the presence or absence of risk or increased risk of a subject to suffer from a cell proliferative disorder, or detecting of a cell proliferative disorder, preferably those according to Table 2 (most preferably lung carcinoma, in particular a lung cancer selected from the group consisting of lung adenocarcinoma; large cell lung cancer; squamous cell lung carcinoma and small cell lung carcinoma.) is determined by analysis of the methylation status or level of one or more CpG dinucleotides of at least one gene or genomic sequence selected from the group consisting of PTGER4; RUNX1; EVX2; EVX-1; SHOX2; SEQ ID NO: 6; CN027; LRAT; IL-12RB1; TFAP2C; BCL2; ARIDA5A (SEQ ID NO: 12); EN2; PRDM14; SEQ ID NO: 81; ARID5A (SEQ ID NO: 82); VAX1; ONECUT1; FOXL-2, TFAP2E and BARHL2 (including promoter or regulatory elements thereof) and EN2-2, EN2-3 and SHOX2-2.

[0125] In one embodiment the invention of said method comprises the following steps: i) contacting genomic DNA (preferably isolated from body fluids) obtained from the subject with at least one reagent, or series of reagents that distinguishes between methylated and non-methylated CpG dinucleotides within at least one gene or genomic sequence selected from the group consisting of PTGER4; RUNX1; EVX2; EVX-1; SHOX2; SEQ ID NO: 6; CN027; LRAT; IL-12RB1; TFAP2C; BCL2; ARIDA5A (SEQ ID NO: 12); EN2; PRDM14; SEQ ID NO: 81; ARID5A (SEQ ID NO: 82); VAX1; ONECUT1; FOXL-2, TFAP2E and BARHL2 (including promoter or regulatory elements thereof) and EN2-2, EN2-3 and SHOX2-2 and ii) detecting cell proliferative disorders, preferably those according to Table 2 (most preferably lung carcinoma). Particularly preferred is a lung cancer selected from the group consisting of lung adenocarcinoma; large cell lung cancer; squamous cell lung carcinoma and small cell lung carcinoma.

[0126] It is preferred that said one or more CpG dinucleotides of at least one gene or genomic sequence selected from the group consisting of PTGER4; RUNX1; EVX2; EVX-1; SHOX2; SEQ ID NO: 6; CN027; LRAT; IL-12RB1; TFAP2C; BCL2; ARIDA5A (SEQ ID NO: 12); EN2; PRDM14; SEQ ID NO: 81; ARID5A (SEQ ID NO: 82); VAX1; ONECUT1; FOXL-2, TFAP2E and BARHL2 (including promoter or regulatory elements thereof) and EN2-2, EN2-3 and SHOX2-2 are comprised within a respective genomic target sequence thereof as provided in SEQ ID NO: 1 to SEQ ID NO: 12; SEQ ID NO: 79 to SEQ ID NO: 83 and SEQ ID NO: 119 to SEQ ID NO: 125 and complements thereof. The present invention further provides a method for ascertaining genetic and/or epigenetic parameters of at least one gene or genomic sequence selected from the group consisting of PTGER4; RUNX1; EVX2; EVX-1; SHOX2; SEQ ID NO: 6; CN027; LRAT; IL-12RB1; TFAP2C; BCL2; ARIDA5A (SEQ ID NO: 12); EN2; PRDM14; SEQ ID NO: 81; ARID5A (SEQ ID NO: 82); VAX1; ONECUT1; FOXL-2, TFAP2E and BARHL2 (including promoter or regulatory elements thereof) and EN2-2, EN2-3 and SHOX2-2 and/or the genomic sequence according to SEQ ID NO: 1 to SEQ ID NO: 12; SEQ ID NO: 79 to SEQ ID NO: 83 and SEQ ID NO: 119 to SEQ ID NO: 125 within a subject by analysing cytosine methylation. Said method comprising contacting a nucleic acid comprising SEQ ID NO: 1 to SEQ ID NO: 12; SEQ ID NO: 79 to SEQ ID NO: 83 and SEQ ID NO: 119 to SEQ ID NO: 125 in a biological sample obtained from said subject with at least one reagent or a series of reagents, wherein said reagent or series of reagents, distinguishes between methylated and non-methylated CpG dinucleotides within the target nucleic acid.

[0127] In a preferred embodiment, said method comprises the following steps: In the first step, a sample of the tissue to be analysed is obtained. The source may be any suitable source, such as cells or cell lines, histological slides, biopsies, paraffin-embedded tissue, body fluids, ejaculate, urine, blood plasma, blood serum, whole blood, isolated blood cells, sputum, biological matter (such as body fluids or cells) derived from the oral epithelium, or biological samples derived from the lung, preferably as a result of bronchoscopy including but not limited to bronchial lavage, bronchial alveolar lavage, bronchial brushing, bronchial abrasion and all possible combinations thereof. More preferably the sample type is selected form the group consisting of blood plasma, sputum, biological samples derived from the lung, preferably biological matter derived from bronchoscopy (including but not limited to bronchial lavage, bronchial alveolar lavage, bronchial brushing, bronchial abrasion) and all possible combinations thereof. It is a preferred embodiment of the method of the invention that the sample type is selected from the group consisting of sputum, oral epithelium and biological samples derived from the lung (as described earlier), most preferably this biological matter is derived from bronchoscopy (including but not limited to bronchial lavage, bronchial alveolar lavage, bronchial brushing, bronchial abrasion).

[0128] The genomic DNA is then isolated from the sample. Genomic DNA may be isolated by any means standard in the art, including the use of commercially available kits. Briefly, wherein the DNA of interest is encapsulated in by a cellular membrane the biological sample must be disrupted and lysed by enzymatic, chemical or mechanical means. The DNA solution may then be cleared of proteins and other contaminants e.g. by digestion with proteinase K. The genomic DNA is then recovered from the solution. This may be carried out by means of a variety of methods including salting out, organic extraction or binding of the DNA to a solid phase support. The choice of method will be affected by several factors including time, expense and required quantity of DNA.

[0129] Wherein the sample DNA is not enclosed in a membrane (e.g. circulating DNA from a blood sample) methods standard in the art for the isolation and/or purification of DNA may be employed. Such methods include the use of a protein degenerating reagent e.g. chaotropic salt e.g. guanidine hydrochloride or urea; or a detergent e.g. sodium dodecyl sulphate (SDS), cyanogen bromide. Alternative methods include but are not limited to ethanol precipitation or propanol precipitation, vacuum concentration amongst others by means of a centrifuge. The person skilled in the art may also make use of devices such as filter devices e.g. ultrafiltration, silica surfaces or membranes, magnetic particles, polystyrol particles, polystyrol surfaces, positively charged surfaces, and positively charged membranes, charged membranes, charged surfaces, charged switch membranes, charged switched surfaces.

[0130] Once the nucleic acids have been extracted, the genomic double stranded DNA is used in the analysis.

[0131] In the second step of the method, the genomic DNA sample is treated in such a manner that cytosine bases, which are unmethylated at the 5′-position, are converted to uracil, thymine, or another base which is dissimilar to cytosine in terms of hybridisation behaviour. This will be understood as ‘pre-treatment’ or ‘treatment’ herein.

[0132] This explicit order of steps is only one embodiment of the method of the invention, because it is also possible and sometimes advantageous to omit the DNA isolation step prior to the Bisulfite treatment. In that case the bisulfite treatment (see in detail below) is performed before the DNA is isolated and/or purified, for example if the sample DNA is not enclosed in a membrane. Hence the bisulfite treatment may be performed on a crude sample, i.e. the biological material itself. In some cases, the presence of a surfactant, such as for example SDS, may be needed.

[0133] This is preferably achieved by means of treatment with a bisulfite reagent. The term “bisulfite reagent” refers to a reagent comprising bisulfite, disulfite, hydrogen sulfite or combinations thereof, useful as disclosed herein to distinguish between methylated and unmethylated CpG dinucleotide sequences. Methods of said treatment are known in the art (e.g. PCT/EP2004/011715, which is incorporated by reference in its entirety). It is preferred that the bisulfite treatment is conducted in the presence of denaturing solvents such as but not limited to n-alkylenglycol, particularly diethylene glycol dimethyl ether (DME), or in the presence of dioxane or dioxane derivatives. In a preferred embodiment the denaturing solvents are used in concentrations between 1% and 35% (v/v). It is also preferred that the bisulfite reaction is carried out in the presence of scavengers such as but not limited to chromane derivatives, e.g., 6-hydroxy-2,5,7,8,-tetramethylchromane 2-carboxylic acid or trihydroxybenzoe acid and derivates thereof, e.g. Gallic acid (see: PCT/EP2004/011715 which is incorporated by reference in its entirety). The bisulfite conversion is preferably carried out at a reaction temperature between 300C and 700C, whereby the temperature is increased to over 850C for short periods of times during the reaction (see: PCT/EP2004/011715 which is incorporated by reference in its entirety). The bisulfite treated DNA is preferably purified priori to the quantification. This may be conducted by any means known in the art, such as but not limited to ultrafiltration, preferably carried out by means of Microcon̂(TM) columns (manufactured by Milliporê(TM)). The purification is carried out according to a modified manufacturer's protocol (see: PCT/EP2004/011715 which is incorporated by reference in its entirety).

[0134] In the third step of the method, fragments of the treated DNA are amplified, using sets of primer oligonucleotides according to the present invention, and an amplification enzyme. The amplification of several DNA segments can be carried out simultaneously in one and the same reaction vessel. Typically, the amplification is carried out using a polymerase chain reaction (PCR). Preferably said amplificates are 100 to 2,000 base pairs in length. The set of primer oligonucleotides includes at least two oligonucleotides whose sequences are each reverse complementary, identical, or hybridise under stringent or highly stringent conditions to an at least 16-base-pair long segment of the base sequences of one of SEQ ID NO: 13 to SEQ ID NO: 60; SEQ ID NO: 84 to SEQ ID NO: 103, SEQ ID NO: 126 to SEQ ID NO: 153 and sequences complementary thereto.

[0135] In an alternate embodiment of the method, the methylation status or level of pre-selected CpG positions within at least one gene or genomic sequence selected from the group consisting of PTGER4; RUNX1; EVX2; EVX-1; SHOX2; SEQ ID NO: 6; CN027; LRAT; IL-12RB1; TFAP2C; BCL2; ARIDA5A (SEQ ID NO: 12); EN2; PRDM14; SEQ ID NO: 81; ARID5A (SEQ ID NO: 82); VAX1; ONECUT1; FOXL-2, TFAP2E and BARHL2 (including promoter or regulatory elements thereof) and EN2-2, EN2-3 and SHOX2-2 and preferably within the nucleic acid sequences according to SEQ ID NO: 1 to SEQ ID NO: 12; SEQ ID NO: 79 to SEQ ID NO: 83 and SEQ ID NO: 119 to SEQ ID NO: 125, may be detected by use of methylation-specific primer oligonucleotides. This technique (MSP) has been described in U.S. Pat. No. 6,265,171 to Herman. The use of methylation status specific primers for the amplification of bisulfite treated DNA allows the differentiation between methylated and unmethylated nucleic acids. MSP primer pairs contain at least one primer, which hybridises to a bisulfite treated CpG dinucleotide. Therefore, the sequence of said primers comprises at least one CpG dinucleotide. MSP primers specific for non-methylated DNA contain a “T’ at the position of the C position in the CpG. Preferably, therefore, the base sequence of said primers is required to comprise a sequence having a length of at least 9 nucleotides which hybridises to a treated nucleic acid sequence according to one of SEQ ID NO: 13 to SEQ ID NO: 60; SEQ ID NO: 84 to SEQ ID NO: 103, SEQ ID NO: 126 to SEQ ID NO: 153 and sequences complementary thereto, wherein the base sequence of said oligomers comprises at least one CpG dinucleotide. A further preferred embodiment of the method comprises the use of blocker oligonucleotides (the HeavyMethyl™ assay). The use of such blocker oligonucleotides has been described in Yu et al. (BioTechniques 23:714-720, 1997). Blocking probe oligonucleotides are hybridised to the bisulfite treated nucleic acid concurrently with the PCR primers. PCR amplification of the nucleic acid is terminated at the 5′ position of the blocking probe, such that amplification of a nucleic acid is suppressed where the complementary sequence to the blocking probe is present. The probes may be designed to hybridize to the bisulfite treated nucleic acid in a methylation status specific manner. For example, for detection of methylated nucleic acids within a population of unmethylated nucleic acids, suppression of the amplification of nucleic acids which are unmethylated at the position in question would be carried out by the use of blocking probes comprising a ‘CpA’ or ‘TpA’ at the position in question, as opposed to a ‘CpG’ if the suppression of amplification of methylated nucleic acids is desired.

[0136] For PCR methods using blocker oligonucleotides, efficient disruption of polymerase-mediated amplification requires that blocker oligonucleotides not be elongated by the polymerase. Preferably, this is achieved through the use of blockers that are 3′-deoxyoligonucleotides, or oligonucleotides derivitized at the 3′ position with other than a “free” hydroxyl group. For example, 3′-O-acetyl oligonucleotides are representative of a preferred class of blocker molecule.

[0137] Additionally, polymerase-mediated decomposition of the blocker oligonucleotides should be precluded. Preferably, such preclusion comprises either use of a polymerase lacking 5′-3′ exonuclease activity, or use of modified blocker oligonucleotides having, for example, thioate bridges at the 5′-terminii thereof that render the blocker molecule nuclease-resistant. Particular applications may not require such 5′ modifications of the blocker. For example, if the blocker- and primer-binding sites overlap, thereby precluding binding of the primer (e.g., with excess blocker), degradation of the blocker oligonucleotide will be substantially precluded. This is because the polymerase will not extend the primer toward, and through (in the 5′-3′ direction) the blocker—a process that normally results in degradation of the hybridized blocker oligonucleotide.

[0138] A particularly preferred blocker/PCR embodiment, for purposes of the present invention and as implemented herein, comprises the use of peptide nucleic acid (PNA) oligomers as blocking oligonucleotides. Such PNA blocker oligomers are ideally suited, because they are neither decomposed nor extended by the polymerase.

[0139] Preferably, therefore, the base sequence of said blocking oligonucleotides is required to comprise a sequence having a length of at least 9 nucleotides which hybridises to a treated nucleic acid sequence according to one of SEQ ID NO: 13 to SEQ ID NO: 60; SEQ ID NO: 84 to SEQ ID NO: 103, SEQ ID NO: 126 to SEQ ID NO: 153 and sequences complementary thereto, wherein the base sequence of said oligonucleotides comprises at least one CpG, TpG or CpA dinucleotide.

[0140] The fragments obtained by means of the amplification can carry a directly or indirectly detectable label. Preferred are labels in the form of fluorescence labels, radionuclides, or detachable molecule fragments having a typical mass which can be detected in a mass spectrometer. Where said labels are mass labels, it is preferred that the labelled amplificates have a single positive or negative net charge, allowing for better delectability in the mass spectrometer. The detection may be carried out and visualized by means of, e.g., matrix assisted laser desorption/ionization mass spectrometry (MALDI) or using electron spray mass spectrometry (ESI).

[0141] Matrix Assisted Laser Desorption/Ionization Mass Spectrometry (MALDI-TOF) is a very efficient development for the analysis of biomolecules (Karas & Hillenkamp, Anal Chem., 60:2299-301, 1988). An analyte is embedded in a light-absorbing matrix. The matrix is evaporated by a short laser pulse thus transporting the analyte molecule into the vapor phase in an unfragmented manner. The analyte is ionized by collisions with matrix molecules. An applied voltage accelerates the ions into a field-free flight tube. Due to their different masses, the ions are accelerated at different rates. Smaller ions reach the detector sooner than bigger ones. MALDI-TOF spectrometry is well suited to the analysis of peptides and proteins. The analysis of nucleic acids is somewhat more difficult (Gut & Beck, Current Innovations and Future Trends, 1:147-57, 1995). The sensitivity with respect to nucleic acid analysis is approximately 100-times less than for peptides, and decreases disproportionally with increasing fragment size. Moreover, for nucleic acids having a multiply negatively charged backbone, the ionization process via the matrix is considerably less efficient. In MALDI-TOF spectrometry, the selection of the matrix plays an eminently important role. For desorption of peptides, several very efficient matrixes have been found which produce a very fine crystallisation. There are now several responsive matrixes for DNA, however, the difference in sensitivity between peptides and nucleic acids has not been reduced. This difference in sensitivity can be reduced, however, by chemically modifying the DNA in such a manner that it becomes more similar to a peptide. For example, phosphorothioate nucleic acids, in which the usual phosphates of the backbone are substituted with thiophosphates, can be converted into a charge-neutral DNA using simple alkylation chemistry (Gut & Beck, Nucleic Acids Res. 23: 1367-73, 1995). The coupling of a charge tag to this modified DNA results in an increase in MALDI-TOF sensitivity to the same level as that found for peptides. A further advantage of charge tagging is the increased stability of the analysis against impurities, which makes the detection of unmodified substrates considerably more difficult.

[0142] In the fourth step of the method, the amplificates obtained during the third step of the method are analysed in order to ascertain the methylation status of the CpG dinucleotides prior to the treatment.

[0143] In embodiments where the amplificates were obtained by means of MSP amplification, the presence or absence of an amplificate is in itself indicative of the methylation state of the CpG positions covered by the primer, according to the base sequences of said primer.

[0144] Amplificates obtained by means of both standard and methylation specific PCR may be further analysed by means of based-based methods such as, but not limited to, array technology and probe based technologies as well as by means of techniques such as sequencing and template directed extension.

[0145] In one embodiment of the method, the amplificates synthesised in step three are subsequently hybridized to an array or a set of oligonucleotides and/or PNA probes. In this context, the hybridization takes place in the following manner: the set of probes used during the hybridization is preferably composed of at least 2 oligonucleotides or PNA-oligomers; in the process, the amplificates serve as probes which hybridize to oligonucleotides previously bonded to a solid phase; the non-hybridized fragments are subsequently removed; said oligonucleotides contain at least one base sequence having a length of at least 9 nucleotides which is reverse complementary or identical to a segment of the base sequences specified in the present Sequence Listing; and the segment comprises at least one CpG, TpG or CpA dinucleotide. The hybridizing portion of the hybridizing nucleic acids is typically at least 9, 15, 20, 25, 30 or 35 nucleotides in length. However, longer molecules have inventive utility, and are thus within the scope of the present invention.

[0146] In a preferred embodiment, said dinucleotide is present in the central third of the oligomer. For example, wherein the oligomer comprises one CpG dinucleotide, said dinucleotide is preferably the fifth to ninth nucleotide from the 5′-end of a 13-mer. One oligonucleotide exists for the analysis of each CpG dinucleotide within a sequence selected from the group consisting SEQ ID NO: 1 to SEQ ID NO: 12; SEQ ID NO: 79 to SEQ ID NO: 83 and SEQ ID NO: 119 to SEQ ID NO: 125, and the equivalent positions within SEQ ID NO: 13 to SEQ ID NO: 60; SEQ ID NO: 84 to SEQ ID NO: 103, SEQ ID NO: 126 to SEQ ID NO: 153. Said oligonucleotides may also be present in the form of peptide nucleic acids. The non-hybridised amplificates are then removed. The hybridised amplificates are then detected. In this context, it is preferred that labels attached to the amplificates are identifiable at each position of the solid phase at which an oligonucleotide sequence is located.

[0147] In yet a further embodiment of the method, the genomic methylation status of the CpG positions may be ascertained by means of oligonucleotide probes (as detailed above) that are hybridised to the bisulfite treated DNA concurrently with the PCR amplification primers (wherein said primers may either be methylation specific or standard).

[0148] A particularly preferred embodiment of this method is the use of fluorescence-based Real Time Quantitative PCR (Heid et al., Genome Res. 6:986-994, 1996; also see U.S. Pat. No. 6,331,393) employing a dual-labelled fluorescent oligonucleotide probe (TaqMan™ PCR, using an ABI Prism 7700 Sequence Detection System, Perkin Elmer Applied Biosystems, Foster City, Calif.). The TaqMan™ PCR reaction employs the use of a non-extendible interrogating oligonucleotide, called a TaqMan™ probe, which, in preferred embodiments, is designed to hybridise to a CpG-rich sequence located between the forward and reverse amplification primers. The TaqMan™ probe further comprises a fluorescent “reporter moiety” and a “quencher moiety” covalently bound to linker moieties (e.g., phosphoramidites) attached to the nucleotides of the TaqMan™ oligonucleotide. For analysis of methylation within nucleic acids subsequent to bisulfite treatment, it is required that the probe be methylation specific, as described in U.S. Pat. No. 6,331,393, (hereby incorporated by reference in its entirety) also known as the MethyLight™ assay. Variations on the TaqMan™ detection methodology that are also suitable for use with the described invention include the use of dual-probe technology (Lightcycler™) or fluorescent amplification primers (Sunrise™ technology). Both these techniques may be adapted in a manner suitable for use with bisulfite treated DNA, and moreover for methylation analysis within CpG dinucleotides.

[0149] In a further preferred embodiment of the method, the fourth step of the method comprises the use of template-directed oligonucleotide extension, such as MS-SNuPE as described by Gonzalgo & Jones, Nucleic Acids Res. 25:2529-2531, 1997.

[0150] In yet a further embodiment of the method, the fourth step of the method comprises sequencing and subsequent sequence analysis of the amplificate generated in the third step of the method (Sanger F., et al., Proc Natl Acad Sci USA 74:5463-5467, 1977).

### Best Mode

[0151] In a preferred embodiment of the method, the genomic nucleic acids are isolated and treated according to the first three steps of the method outlined above, namely:
[0152] a) obtaining, from a subject, a biological sample having subject genomic DNA;
[0153] b) extracting or otherwise isolating the genomic DNA;
[0154] c) treating the genomic DNA of b), or a fragment thereof, with one or more reagents to convert cytosine bases that are unmethylated in the 5-position thereof to uracil or to another base that is detectably dissimilar to cytosine in terms of hybridization properties; and wherein
[0155] d) amplifying subsequent to treatment in c) is carried out in a methylation specific manner, namely by use of methylation specific primers or methylation specific blocking oligonucleotides, and further wherein
[0156] e) detecting of the amplificates is carried out by means of a real-time detection probe, as described above.

[0157] Preferably, where the subsequent amplification of d) is carried out by means of methylation specific primers, as described above, said methylation specific primers comprise a sequence having a length of at least 9 nucleotides which hybridises to a treated nucleic acid sequence according to one of SEQ ID NO: 13 to SEQ ID NO: 60; SEQ ID NO: 84 to SEQ ID NO: 103, SEQ ID NO: 126 to SEQ ID NO: 153 and sequences complementary thereto, wherein the base sequence of said oligomers comprises at least one CpG dinucleotide, but preferably two or three.

[0158] Step e) of the method, namely the detection of the specific amplificates indicative of the methylation status of one or more CpG positions according to SEQ ID NO: 1 to SEQ ID NO: 12; SEQ ID NO: 79 to SEQ ID NO: 83 and SEQ ID NO: 119 to SEQ ID NO: 125 is carried out by means of real-time detection methods as described above.

[0159] Additional embodiments of the invention provide a method for the analysis of the methylation status of the at least one gene or genomic sequence selected from the group consisting of PTGER4; RUNX1; EVX2; EVX-1; SHOX2; SEQ ID NO: 6; CN027; LRAT; IL-12RB1; TFAP2C; BCL2; ARIDA5A (SEQ ID NO: 12); EN2; PRDM14; SEQ ID NO: 81; ARID5A (SEQ ID NO: 82); VAX1; ONECUT1; FOXL-2, TFAP2E and BARHL2 (including promoter or regulatory elements thereof) and EN2-2, EN2-3 and SHOX2-2 (preferably SEQ ID NO: 1 to SEQ ID NO: 12; SEQ ID NO: 79 to SEQ ID NO: 83 and SEQ ID NO: 119 to SEQ ID NO: 125, and complements thereof) without the need for bisulfite conversion. Methods are known in the art wherein a methylation sensitive restriction enzyme reagent, or a series of restriction enzyme reagents comprising methylation sensitive restriction enzyme reagents that distinguishes between methylated and non-methylated CpG dinucleotides within a target region are utilized in determining methylation, for example but not limited to DMH.

[0160] In the first step of such additional embodiments, the genomic DNA sample is isolated from tissue or cellular sources. Genomic DNA may be isolated by any means standard in the art, including the use of commercially available kits. Briefly, wherein the DNA of interest is encapsulated in by a cellular membrane the biological sample must be disrupted and lysed by enzymatic, chemical or mechanical means. The DNA solution may then be cleared of proteins and other contaminants, e.g., by digestion with proteinase K. The genomic DNA is then recovered from the solution. This may be carried out by means of a variety of methods including salting out, organic extraction or binding of the DNA to a solid phase support. The choice of method will be affected by several factors including time, expense and required quantity of DNA. All clinical sample types comprising neoplastic or potentially neoplastic matter are suitable for use in the present method, preferred are cells or cell lines, histological slides, biopsies, paraffin-embedded tissue, body fluids, ejaculate, urine, blood plasma, blood serum, whole blood, isolated blood cells, sputum, oral epithelium and biological samples derived from the lung, such as biological matter derived from bronchoscopy (including but not limited to bronchial lavage, bronchial alveolar lavage, bronchial brushing, bronchial abrasion and combinations thereof. More preferably the sample type is selected form the group consisting of blood plasma, sputum and biological matter derived from the lung, preferably derived from bronchoscopy (including but not limited to bronchial lavage, bronchial alveolar lavage, bronchial brushing and bronchial abrasion) and all possible combinations thereof.

[0161] Once the nucleic acids have been extracted, the genomic double-stranded DNA is used in the analysis.

[0162] In a preferred embodiment, the DNA may be cleaved prior to treatment with methylation sensitive restriction enzymes. Such methods are known in the art and may include both physical and enzymatic means. Particularly preferred is the use of one or a plurality of restriction enzymes which are not methylation sensitive, and whose recognition sites are AT rich and do not comprise CG dinucleotides. The use of such enzymes enables the conservation of CpG islands and CpG rich regions in the fragmented DNA. The non-methylation-specific restriction enzymes are preferably selected from the group consisting of MseI, BfaI, Csp6I, Tru1I, Tvu1I, Tru9I, Tvu9I, MaeI and XspI. Particularly preferred is the use of two or three such enzymes. Particularly preferred is the use of a combination of MseI, BfaI and Csp6I.

[0163] The fragmented DNA may then be ligated to adaptor oligonucleotides in order to facilitate subsequent enzymatic amplification. The ligation of oligonucleotides to blunt and sticky ended DNA fragments is known in the art, and is carried out by means of dephosphorylation of the ends (e.g. using calf or shrimp alkaline phosphatase) and subsequent ligation using ligase enzymes (e.g. T4 DNA ligase) in the presence of dATPs. The adaptor oligonucleotides are typically at least 18 base pairs in length.

[0164] In the third step, the DNA (or fragments thereof) is then digested with one or more methylation sensitive restriction enzymes. The digestion is carried out such that hydrolysis of the DNA at the restriction site is informative of the methylation status of a specific CpG dinucleotide of at least one gene or genomic sequence selected from the group consisting of PTGER4; RUNX1; EVX2; EVX-1; SHOX2; SEQ ID NO: 6; CN027; LRAT; IL-12RB1; TFAP2C; BCL2; ARIDA5A (SEQ ID NO: 12); EN2; PRDM14; SEQ ID NO: 81; ARID5A (SEQ ID NO: 82); VAX1; ONECUT1; FOXL-2, TFAP2E and BARHL2 (including promoter or regulatory elements thereof) and EN2-2, EN2-3 and SHOX2-2.

[0165] Preferably, the methylation-specific restriction enzyme is selected from the group consisting of Bsi E1, Hga I HinPI, Hpy99I, Ava I, Bce AI, Bsa HI, BisI, BstUI, BshI236I, AccII, BstFNI, McrBC, GlaI, MvnI, HpaII (HapII), HhaI, AciI, SmaI, HinP1I, HpyCH4IV, EagI and mixtures of two or more of the above enzymes. Preferred is a mixture containing the restriction enzymes BstUI, HpaII, HpyCH4IV and HinP1I.

[0166] In the fourth step, which is optional but a preferred embodiment, the restriction fragments are amplified. This is preferably carried out using a polymerase chain reaction, and said amplificates may carry suitable detectable labels as discussed above, namely fluorophore labels, radionuclides and mass labels. Particularly preferred is amplification by means of an amplification enzyme and at least two primers comprising, in each case a contiguous sequence at least 16 nucleotides in length that is complementary to, or hybridizes under moderately stringent or stringent conditions to a sequence selected from the group consisting SEQ ID NO: 1 to SEQ ID NO: 12; SEQ ID NO: 79 to SEQ ID NO: 83 and SEQ ID NO: 119 to SEQ ID NO: 125, and complements thereof. Preferably said contiguous sequence is at least 16, 20 or 25 nucleotides in length. In an alternative embodiment said primers may be complementary to any adaptors linked to the fragments.

[0167] In the fifth step the amplificates are detected. The detection may be by any means standard in the art, for example, but not limited to, gel electrophoresis analysis, hybridisation analysis, incorporation of detectable tags within the PCR products, DNA array analysis, MALDI or ESI analysis. Preferably said detection is carried out by hybridisation to at least one nucleic acid or peptide nucleic acid comprising in each case a contiguous sequence at least 16 nucleotides in length that is complementary to, or hybridizes under moderately stringent or stringent conditions to a sequence selected from the group consisting of SEQ ID NO: 1 to SEQ ID NO: 12; SEQ ID NO: 79 to SEQ ID NO: 83 and SEQ ID NO: 119 to SEQ ID NO: 125, and complements thereof. Preferably said contiguous sequence is at least 16, 20 or 25 nucleotides in length.

[0168] Subsequent to the determination of the methylation state or methylation level of the genomic nucleic acids obtained from a subject's sample, the risk or increased risk of a subject to suffer from a cell proliferative disorder, preferably those according to Table 2 (most preferably lung carcinoma), or the presence of such a cell proliferative disorder is deduced based upon the methylation state or level of at least one CpG dinucleotide sequence of SEQ ID NO: 1 to SEQ ID NO: 12; SEQ ID NO: 79 to SEQ ID NO: 83 and SEQ ID NO: 119 to SEQ ID NO: 125, or an average, or a value reflecting an average methylation state of a plurality of CpG dinucleotide sequences of SEQ ID NO: 1 to SEQ ID NO: 12; SEQ ID NO: 79 to SEQ ID NO: 83 and SEQ ID NO: 119 to SEQ ID NO: 125 wherein methylation is associated with the presence of cell proliferative disorders, preferably those according to Table 2 (most preferably lung carcinoma). Wherein said methylation is determined by quantitative means the cut-off point for determining said presence of methylation is preferably zero (i.e. wherein a sample displays any degree of methylation it is determined as having a methylated status at the analyzed CpG position). Nonetheless, it is foreseen that the person skilled in the art may wish to adjust said cut-off value in order to provide an assay of a particularly preferred sensitivity or specificity. Accordingly said cut-off value may be increased (thus increasing the specificity), said cut off value may be within a range selected form the group consisting of 0%-5%, 5%-10%, 10%-15%, 15%-20%, 20%-30% and 30%-50%. Particularly preferred are the cut-offs 10%, 15%, 25%, and 30%.

[0169] Upon determination of the methylation and/or expression of at least one gene or genomic sequence selected from the group consisting of PTGER4; RUNX1; EVX2; EVX-1; SHOX2; SEQ ID NO: 6; CN027; LRAT; IL-12RB1; TFAP2C; BCL2; ARIDA5A (SEQ ID NO: 12); EN2; PRDM14; SEQ ID NO: 81; ARID5A (SEQ ID NO: 82); VAX1; ONECUT1; FOXL-2, TFAP2E and BARHL2 (including promoter or regulatory elements thereof) and EN2-2, EN2-3 and SHOX2-2 the presence or absence of a cell proliferative disorder or an increased risk of a subject to suffer from a cell proliferative disorder, preferably those according to Table 2 (most preferably lung carcinoma) is determined, wherein hyper-methylation and/or under-expression indicates the presence of cell proliferative disorders and/or the presence of an increased risk of the subject to suffer from such a disorder, preferably those according to Table 2 (most preferably lung carcinoma) and hypo-methylation and/or over-expression indicates the absence of cell proliferative disorders within the subject, and/or the absence of an increased risk of the subject to suffer from such a disorder, preferably those according to Table 2 (most preferably lung carcinoma). It is particularly preferred that said proliferative disorder is a lung cancer selected from the group consisting of lung adenocarcinoma; large cell lung cancer; squamous cell lung carcinoma and small cell lung carcinoma.

[0170] An increased risk is to be understood as a risk that is at least two fold higher than the average risk of the population with the same gender in the same age group (wherein subjects belong to the same age group if they are not more than 5 years older or younger than the subject analysed). Wherein the specification refers to a risk, this risk is understood to be a higher risk or increased risk as defined above.

### Further Improvements

[0171] In certain aspects, the disclosed invention provides treated nucleic acids, derived from genomic SEQ ID NO: 1 to SEQ ID NO: 12; SEQ ID NO: 79 to SEQ ID NO: 83 and SEQ ID NO: 119 to SEQ ID NO: 125, wherein the treatment is suitable to convert at least one unmethylated cytosine base of the genomic DNA sequence to uracil or another base that is detectably dissimilar to cytosine in terms of hybridization. The genomic sequences in question may comprise one, or more consecutive methylated CpG positions. Said treatment preferably comprises use of a reagent selected from the group consisting of bisulfite, hydrogen sulfite, disulfite, and combinations thereof. Said treatment may however also comprise an appropriate enzymatic treatment (instead of the bisulfite treatment), resulting in conversion of the unmethylated cytosines into base pairs with a different base pairing behaviours. In a preferred embodiment of the invention, the invention provides a non-naturally occurring modified nucleic acid comprising a sequence of at least 16 contiguous nucleotide bases in length of a sequence selected from the group consisting of SEQ ID NO: 13 to SEQ ID NO: 60; SEQ ID NO: 84 to SEQ ID NO: 103, SEQ ID NO: 126 TO SEQ ID NO: 153. In further preferred embodiments of the invention said nucleic acid is at least 50, 100, 150, 200, 250 or 500 base pairs in length of a segment of the nucleic acid sequence disclosed in SEQ ID NO: 13 to SEQ ID NO: 60; SEQ ID NO: 84 to SEQ ID NO: 103, SEQ ID NO: 126 to SEQ ID NO: 153. Particularly preferred is a nucleic acid molecule that is identical or complementary to all or a portion of the sequences SEQ ID NO: 13 to SEQ ID NO: 60; SEQ ID NO: 84 to SEQ ID NO: 103, SEQ ID NO: 126 to SEQ ID NO: 153 but not to SEQ ID NO: 1 to SEQ ID NO: 12; SEQ ID NO: 79 to SEQ ID NO: 83 and SEQ ID NO: 119 to SEQ ID NO: 125 or other naturally occurring DNA.

[0172] It is preferred that said sequence comprises at least one CpG, TpA or CpA dinucleotide and sequences complementary thereto. The sequences of SEQ ID NO: 13 to SEQ ID NO: 60; SEQ ID NO: 84 to SEQ ID NO: 103, SEQ ID NO: 126 TO SEQ ID NO: 153 provide non-naturally occurring modified versions of the nucleic acid according to SEQ ID NO: 1 to SEQ ID NO: 12; SEQ ID NO: 79 to SEQ ID NO: 83 and SEQ ID NO: 119 TO SEQ ID NO: 125, wherein the modification of each genomic sequence results in the synthesis of a nucleic acid having a sequence that is unique and distinct from said genomic sequence as follows. For each sense strand genomic DNA, e.g., SEQ ID NO: 1 to SEQ ID NO: 12; SEQ ID NO: 79 to SEQ ID NO: 83 and SEQ ID NO: 119 to SEQ ID NO: 125, four converted versions are disclosed. A first version wherein “C” is converted to “T,” but “CpG” remains “CpG” (i.e., corresponds to case where, for the genomic sequence, all “C” residues of CpG dinucleotide sequences are methylated and are thus not converted); a second version discloses the complement of the disclosed genomic DNA sequence (i.e. antisense strand), wherein “C” is converted to “T,” but “CpG” remains “CpG” (i.e., corresponds to case where, for all “C” residues of CpG dinucleotide sequences are methylated and are thus not converted). The ‘upmethylated’ converted sequences of SEQ ID NO: 1 to SEQ ID NO: 12; SEQ ID NO: 79 to SEQ ID NO: 83 and SEQ ID NO: 119 to SEQ ID NO: 125 correspond to SEQ ID NO: 13 & SEQ ID NO: 36; SEQ ID NO: 84 to SEQ ID NO: 93. A third chemically converted version of each genomic sequences is provided, wherein “C” is converted to “T” for all “C” residues, including those of “CpG” dinucleotide sequences (i.e., corresponds to case where, for the genomic sequences, all “C” residues of CpG dinucleotide sequences are unmethylated); a final chemically converted version of each sequence, discloses the complement of the disclosed genomic DNA sequence (i.e. antisense strand), wherein “C” is converted to “T” for all “C” residues, including those of “CpG” dinucleotide sequences (i.e., corresponds to case where, for the complement (antisense strand) of each genomic sequence, all “C” residues of CpG dinucleotide sequences are unmethylated). The ‘downmethylated’ converted sequences of SEQ ID NO: 1 to SEQ ID NO: 12; SEQ ID NO: 79 to SEQ ID NO: 83 and SEQ ID NO: 119 to SEQ ID NO: 125 corresponds to SEQ ID NO: 37 to SEQ ID NO: 60; SEQ ID NO: 84 to SEQ ID NO: 93.

[0173] Significantly, heretofore, the nucleic acid sequences and molecules according SEQ ID NO: 13 to SEQ ID NO: 60; SEQ ID NO: 84 to SEQ ID NO: 103, SEQ ID NO: 126 to SEQ ID NO: 153 were not implicated in or connected with the detection or diagnosis of cell proliferative disorders, preferably those according to Table 2 (most preferably lung carcinoma). It is particularly preferred that the cell proliferative disorder is a lung cancer selected from the group consisting of lung adenocarcinoma; large cell lung cancer; squamous cell lung carcinoma and small cell lung carcinoma.

[0174] In an alternative preferred embodiment, the invention further provides oligonucleotides or oligomers suitable for use in the methods of the invention for detecting the cytosine methylation state within genomic or treated (chemically modified) DNA, according to SEQ ID NO: 1 to SEQ ID NO: 60; SEQ ID NO: 79 to SEQ ID NO: 103; SEQ ID NO: 119 to SEQ ID NO: 148. Said oligonucleotide or oligomer nucleic acids provide novel diagnostic means. Said oligonucleotide or oligomer comprising a nucleic acid sequence having a length of at least nine (9) nucleotides which is identical to, hybridizes, under moderately stringent or stringent conditions (as defined herein above), to a treated nucleic acid sequence according to SEQ ID NO: 13 to SEQ ID NO: 60; SEQ ID NO: 84 to SEQ ID NO: 103, SEQ ID NO: 126 to SEQ ID NO: 153 and/or sequences complementary thereto, or to a genomic sequence according to SEQ ID NO: 1 to SEQ ID NO: 12; SEQ ID NO: 79 to SEQ ID NO: 83 and SEQ ID NO: 119 to SEQ ID NO: 125 and/or sequences complementary thereto.

[0175] Thus, the present invention includes nucleic acid molecules (e.g., oligonucleotides and peptide nucleic acid (PNA) molecules (PNA-oligomers)) that hybridize under moderately stringent and/or stringent hybridization conditions to all or a portion of the sequences SEQ ID NO: 1 to SEQ ID NO: 60; SEQ ID NO: 79 to SEQ ID NO: 103, SEQ ID NO: 119 TO SEQ ID NO: 148 or to the complements thereof. Particularly preferred is a nucleic acid molecule that hybridizes under moderately stringent and/or stringent hybridization conditions to all or a portion of the sequences SEQ ID NO: 13 to SEQ ID NO: 60; SEQ ID NO: 84 to SEQ ID NO: 103, SEQ ID NO: 126 to SEQ ID NO: 153 but not to SEQ ID NO: 1 to SEQ ID NO: 12; SEQ ID NO: 79 to SEQ ID NO: 83 and SEQ ID NO: 119 to SEQ ID NO: 125 or other human genomic DNA.

[0176] The identical or hybridizing portion of the hybridizing nucleic acids is typically at least 9, 16, 20, 25, 30 or 35 nucleotides in length. However, longer molecules have inventive utility, and are thus within the scope of the present invention.

[0177] Preferably, the hybridizing portion of the inventive hybridizing nucleic acids is at least 95%, or at least 98%, or 100% identical to the sequence, or to a portion thereof of SEQ ID NO: 13 to SEQ ID NO: 60; SEQ ID NO: 84 to SEQ ID NO: 103, SEQ ID NO: 126 to SEQ ID NO: 153, or to the complements thereof.

[0178] Hybridizing nucleic acids of the type described herein can be used, for example, as a primer (e.g., a PCR primer), or a diagnostic probe or primer. Preferably, hybridization of the oligonucleotide probe to a nucleic acid sample is performed under stringent conditions and the probe is 100% identical to the target sequence. Nucleic acid duplex or hybrid stability is expressed as the melting temperature or Tm, which is the temperature at which a probe dissociates from a target DNA. This melting temperature is used to define the required stringency conditions.

[0179] For target sequences that are related and substantially identical to the corresponding sequence of SEQ ID NO: 1 to SEQ ID NO: 12; SEQ ID NO: 79 to SEQ ID NO: 83 and SEQ ID NO: 119 to SEQ ID NO: 125 (such as allelic variants and SNPs), rather than identical, it is useful to first establish the lowest temperature at which only homologous hybridization occurs with a particular concentration of salt (e.g., SSC or SSPE). Then, assuming that 1% mismatching results in a 10C decrease in the Tm, the temperature of the final wash in the hybridization reaction is reduced accordingly (for example, if sequences having >95% identity with the probe are sought, the final wash temperature is decreased by 5° C.). In practice, the change in Tm can be between 0.5° C. and 1.5° C. per 1% mismatch.

[0180] Examples of inventive oligonucleotides of length X (in nucleotides), as indicated by polynucleotide positions with reference to, e.g., SEQ ID NO: 1, include those corresponding to sets (sense and antisense sets) of consecutively overlapping oligonucleotides of length X, where the oligonucleotides within each consecutively overlapping set (corresponding to a given X value) are defined as the finite set of Z oligonucleotides from nucleotide positions:

[0181] n to (n+(X−1));

[0182] where n=1, 2, 3, . . . (Y−(X−1));

[0183] where Y equals the length (nucleotides or base pairs) of SEQ ID NO: 1 (3905);

[0184] where X equals the common length (in nucleotides) of each oligonucleotide in the set (e.g., X=20 for a set of consecutively overlapping 20-mers); and

[0185] where the number (Z) of consecutively overlapping oligomers of length X for a given SEQ ID NO 1 of length Y is equal to Y−(X−1). For example Z=3905−19=3886 for either sense or antisense sets of SEQ ID NO: 1, where X=20.

[0186] Preferably, the set is limited to those oligomers that comprise at least one CpG, TpG or CpA dinucleotide, and thus hybridise in any case to a region of the converted target DNA, that comprises at least one (methylated or unmethylated) CpG in its unconverted version.

[0187] Examples of inventive 20-mer oligonucleotides include the following set of 3905 oligomers (and the antisense set complementary thereto), indicated by polynucleotide positions with reference to SEQ ID NO: 1: 1-20, 2-21, 3-22, 4-23, 5-24, . . . and 3886-3905

[0188] Preferably, the set is limited to those oligomers that comprise at least one CpG, TpG or CpA dinucleotide and thus hybridise in any case to a region of the converted target DNA, that comprises at least one (methylated or unmethylated) CpG in its unconverted version.

[0189] Likewise, examples of inventive 25-mer oligonucleotides include the following set of 3881 oligomers (and the antisense set complementary thereto), indicated by polynucleotide positions with reference to SEQ ID NO: 1:

[0190] 1-25, 2-26, 3-27, 4-28, 5-29, . . . and 3881-3905.

[0191] Preferably, the set is limited to those oligomers that comprise at least one CpG, TpG or CpA dinucleotide and thus hybridise in any case to a region of the converted target DNA, that comprises at least one (methylated or unmethylated) CpG in its unconverted version.

[0192] The present invention encompasses, for each of SEQ ID NO: 1 to SEQ ID NO: 60; SEQ ID NO: 79 to SEQ ID NO: 103, SEQ ID NO: 119 TO SEQ ID NO: 148 (sense and antisense), multiple consecutively overlapping sets of oligonucleotides or modified oligonucleotides of length X, where, e.g., X=9, 10, 17, 20, 22, 23, 25, 27, 30 or 35 nucleotides.

[0193] The oligonucleotides or oligomers according to the present invention constitute effective tools useful to ascertain genetic and epigenetic parameters of the genomic sequence corresponding to SEQ ID NO: 1 to SEQ ID NO: 12; SEQ ID NO: 79 to SEQ ID NO: 83 and SEQ ID NO: 119 to SEQ ID NO: 125. Preferred sets of such oligonucleotides or modified oligonucleotides of length X are those consecutively overlapping sets of oligomers corresponding to SEQ ID NO: 1 to SEQ ID NO: 60; SEQ ID NO: 79 to SEQ ID NO: 103, SEQ ID NO: 119 TO SEQ ID NO: 148 (and to the complements thereof). Preferably, said oligomers comprise at least one CpG, TpG or CpA dinucleotide and thus hybridise in any case to a region of the converted target DNA, that comprises at least one (methylated or unmethylated) CpG in its unconverted version.

[0194] Particularly preferred oligonucleotides or oligomers according to the present invention are those in which the cytosine of the CpG dinucleotide (or of the corresponding converted TpG or CpA dinucleotide) sequences is within the middle third of the oligonucleotide; that is, where the oligonucleotide is, for example, 13 bases in length, the CpG, TpG or CpA dinucleotide is positioned within the fifth to ninth nucleotide from the 5′-end.

[0195] The oligonucleotides of the invention can also be modified by chemically linking the oligonucleotide to one or more moieties or conjugates to enhance the activity, stability or detection of the oligonucleotide. Such moieties or conjugates include chromophores, fluorophors, lipids such as cholesterol, cholic acid, thioether, aliphatic chains, phospholipids, polyamines, polyethylene glycol (PEG), palmityl moieties, and others as disclosed in, for example, U.S. Pat. Nos. 5,514,758, 5,565,552, 5,567,810, 5,574,142, 5,585,481, 5,587,371, 5,597,696 and 5,958,773. The probes may also exist in the form of a PNA (peptide nucleic acid) which has particularly preferred pairing properties. Thus, the oligonucleotide may include other appended groups such as peptides, and may include hybridization-triggered cleavage agents (Krol et al., BioTechniques 6:958-976, 1988) or intercalating agents (Zon, Pharm. Res. 5:539-549, 1988). To this end, the oligonucleotide may be conjugated to another molecule, e.g., a chromophore, fluorophor, peptide, hybridization-triggered cross-linking agent, transport agent, hybridization-triggered cleavage agent, etc.

[0196] The oligonucleotide may also comprise at least one art-recognized modified sugar and/or base moiety, or may comprise a modified backbone or non-natural internucleoside linkage.

[0197] The oligonucleotides or oligomers according to particular embodiments of the present invention are typically used in ‘sets,’ which contain at least one oligomer for analysis of each of the CpG dinucleotides of a genomic sequence or parts thereof selected from the group consisting of SEQ ID NO: 1 to SEQ ID NO: 12; SEQ ID NO: 79 to SEQ ID NO: 83 and SEQ ID NO: 119 to SEQ ID NO: 125 and sequences complementary thereto, or to the corresponding CpG, TpG or CpA dinucleotide within a sequence of the treated nucleic acids according to SEQ ID NO: 13 to SEQ ID NO: 60; SEQ ID NO: 84 to SEQ ID NO: 103, SEQ ID NO: 126 to SEQ ID NO: 153 and sequences complementary thereto. However, it is anticipated that for economic or other factors it may be preferable to analyse a limited selection of the CpG dinucleotides within said sequences, and the content of the set of oligonucleotides is altered accordingly.

[0198] Therefore, in particular embodiments, the present invention provides a set of at least two (2) (oligonucleotides and/or PNA-oligomers) useful for detecting the cytosine methylation state in treated genomic DNA (SEQ ID NO: 13 to SEQ ID NO: 60; SEQ ID NO: 84 to SEQ ID NO: 103, SEQ ID NO: 126 to SEQ ID NO: 153), or in genomic DNA (SEQ ID NO: 1 to SEQ ID NO: 12; SEQ ID NO: 79 to SEQ ID NO: 83 and SEQ ID NO: 119 to SEQ ID NO: 125 and sequences complementary thereto). These probes enable diagnosis and detection of cell proliferative disorders, preferably those according to Table 2 (most preferably lung carcinoma). It is particularly preferred that it is a lung cancer selected from the group consisting of lung adenocarcinoma; large cell lung cancer; squamous cell lung carcinoma and small cell lung carcinoma. The set of oligomers may also be used for detecting single nucleotide polymorphisms (SNPs) in treated genomic DNA (SEQ ID NO: 13 to SEQ ID NO: 60; SEQ ID NO: 84 to SEQ ID NO: 103, SEQ ID NO: 126 to SEQ ID NO: 153), or in genomic DNA (SEQ ID NO: 1 to SEQ ID NO: 12; SEQ ID NO: 79 to SEQ ID NO: 83 and SEQ ID NO: 119 to SEQ ID NO: 125 and sequences complementary thereto).

[0199] In preferred embodiments, at least one, and more preferably all members of a set of oligonucleotides is bound to a solid phase.

[0200] In further embodiments, the present invention provides a set of at least two (2) oligonucleotides that are used as ‘primer’ oligonucleotides for amplifying DNA sequences of one of SEQ ID NO: 1 to SEQ ID NO: 60; SEQ ID NO: 79 to SEQ ID NO: 103, SEQ ID NO: 119 TO SEQ ID NO: 148 and sequences complementary thereto, or segments thereof.

[0201] It is anticipated that the oligonucleotides may constitute all or part of an “array” or “DNA chip” (i.e., an arrangement of different oligonucleotides and/or PNA-oligomers bound to a solid phase). Such an array of different oligonucleotide- and/or PNA-oligomer sequences can be characterized, for example, in that it is arranged on the solid phase in the form of a rectangular or hexagonal lattice. The solid-phase surface may be composed of silicon, glass, polystyrene, aluminium, steel, iron, copper, nickel, silver, or gold. Nitrocellulose as well as plastics such as nylon, which can exist in the form of pellets or also as resin matrices, may also be used. An overview of the Prior Art in oligomer array manufacturing can be gathered from a special edition of Nature Genetics (Nature Genetics Supplement, Volume 21, January 1999, and from the literature cited therein). Fluorescently labelled probes are often used for the scanning of immobilized DNA arrays. The simple attachment of Cy3 and Cy5 dyes to the 5′-OH of the specific probe are particularly suitable for fluorescence labels. The detection of the fluorescence of the hybridised probes may be carried out, for example, via a confocal microscope. Cy3 and Cy5 dyes, besides many others, are commercially available.

[0202] It is also anticipated that the oligonucleotides, or particular sequences thereof, may constitute all or part of an “virtual array” wherein the oligonucleotides, or particular sequences thereof, are used, for example, as ‘specifiers’ as part of, or in combination with a diverse population of unique labeled probes to analyze a complex mixture of analytes. Such a method, for example is described in US 2003/0013091 (U.S. Ser. No. 09/898,743, published 16 Jan. 2003), which is hereby incorporated by reference. In such methods, enough labels are generated so that each nucleic acid in the complex mixture (i.e., each analyte) can be uniquely bound by a unique label and thus detected (each label is directly counted, resulting in a digital read-out of each molecular species in the mixture).

[0203] It is particularly preferred that the oligomers according to the invention are utilised for detecting, or for diagnosing cell proliferative disorders, preferably those according to Table 2 (most preferably lung carcinoma) or for detecting the presence or absence of an increased risk of a subject to suffer from a cell proliferative disorder, preferably those according to Table 2 (most preferably lung carcinoma). It is particularly preferred that the disorder is a lung cancer and that it is selected from the group consisting of lung adenocarcinoma; large cell lung cancer; squamous cell lung carcinoma and small cell lung carcinoma.

### Kits

[0204] Moreover, additional aspects of the present invention provide a kit, comprising: a means for determining the expression or methylation status or levels of at least one gene or genomic sequence selected from the group consisting of PTGER4; RUNX1; EVX2; EVX-1; SHOX2; SEQ ID NO: 6; CN027; LRAT; IL-12RB1; TFAP2C; BCL2; ARIDA5A (SEQ ID NO: 12); EN2; PRDM14; SEQ ID NO: 81; ARID5A (SEQ ID NO: 82); VAX1; ONECUT1; FOXL-2, TFAP2E and BARHL2 (including promoter or regulatory elements thereof) and EN2-2, EN2-3 and SHOX2-2. The means for determining the expression or methylation status or levels of at least one gene or genomic sequence selected from the group consisting of PTGER4; RUNX1; EVX2; EVX-1; SHOX2; SEQ ID NO: 6; CN027; LRAT; IL-12RB1; TFAP2C; BCL2; ARIDA5A (SEQ ID NO: 12); EN2; PRDM14; SEQ ID NO: 81; ARID5A (SEQ ID NO: 82); VAX1; ONECUT1; FOXL-2, TFAP2E and BARHL2 (including promoter or regulatory elements thereof) and EN2-2, EN2-3 and SHOX2-2 preferably comprise a bisulfite-containing reagent; one or a plurality of oligonucleotides wherein the sequences thereof are identical, are complementary, or hybridise under stringent or highly stringent conditions to a 9 or more preferably 18 base long segment of a sequence selected from SEQ ID NO: 13 to SEQ ID NO: 60; SEQ ID NO: 84 to SEQ ID NO: 103, SEQ ID NO: 126 to SEQ ID NO: 153; and optionally instructions for carrying out and evaluating the described method of methylation analysis. In one embodiment the base sequence of said oligonucleotides comprises at least one CpG, CpA or TpG dinucleotide.

[0205] In further embodiments, said kit may further comprise standard reagents for performing a CpG position-specific methylation analysis, wherein said analysis comprises one or more of the following techniques: MS-SNuPE, MSP, MethyLight™, HeavyMethyl, COBRA, and nucleic acid sequencing. However, a kit along the lines of the present invention can also contain only part of the aforementioned components.

[0206] In preferred embodiments, the kit may comprise additional bisulfite conversion reagents selected from the group consisting: DNA denaturation buffer; sulfonation buffer; DNA recovery reagents or kits (e.g., precipitation, ultrafiltration, affinity column); desulfonation buffer; and DNA recovery components.

[0207] In yet further alternative embodiments, the kit may contain, packaged in separate containers, a polymerase and a reaction buffer optimised for primer extension mediated by the polymerase, such as PCR. In another embodiment of the invention the kit further comprising means for obtaining a biological sample of the patient. Preferred is a kit, which further comprises a container suitable for containing the means for determining methylation of at least one gene or genomic sequence selected from the group consisting of PTGER4; RUNX1; EVX2; EVX-1; SHOX2; SEQ ID NO: 6; CN027; LRAT; IL-12RB1; TFAP2C; BCL2; ARIDA5A (SEQ ID NO: 12); EN2; PRDM14; SEQ ID NO: 81; ARID5A (SEQ ID NO: 82); VAX1; ONECUT1; FOXL-2, TFAP2E and BARHL2 (including promoter or regulatory elements thereof) and EN2-2, EN2-3 and SHOX2-2 in the biological sample of the patient, and most preferably further comprises instructions for use and interpretation of the kit results. In a preferred embodiment the kit comprises: (a) a bisulfite reagent; (b) a container suitable for containing the said bisulfite reagent and the biological sample of the patient; (c) at least one set of primer oligonucleotides containing two oligonucleotides whose sequences in each case are identical, are complementary, or hybridise under stringent or highly stringent conditions to a 9 or more preferably 18 base long segment of a sequence selected from SEQ ID NO: 13 to SEQ ID NO: 60; SEQ ID NO: 84 to SEQ ID NO: 103, SEQ ID NO: 126 to SEQ ID NO: 153; and optionally (d) instructions for use and interpretation of the kit results. In an alternative preferred embodiment the kit comprises: (a) a bisulfite reagent; (b) a container suitable for containing the said bisulfite reagent and the biological sample of the patient; (c) at least one oligonucleotides and/or PNA-oligomer having a length of at least 9 or 16 nucleotides which is identical to or hybridises to a pre-treated nucleic acid sequence according to one of SEQ ID NO: 13 to SEQ ID NO: 60; SEQ ID NO: 84 to SEQ ID NO: 103, SEQ ID NO: 126 to SEQ ID NO: 153 and sequences complementary thereto; and optionally (d) instructions for use and interpretation of the kit results.

[0208] In alternative embodiments, the kit comprises: (a) a bisulfite reagent; (b) a container suitable for containing the said bisulfite reagent and the biological sample of the patient; (c) at least one set of primer oligonucleotides containing two oligonucleotides whose sequences in each case are identical, are complementary, or hybridise under stringent or highly stringent conditions to a 9 or more preferably 18 base long segment of a sequence selected from SEQ ID NO: 13 to SEQ ID NO: 60; SEQ ID NO: 84 to SEQ ID NO: 103, SEQ ID NO: 126 to SEQ ID NO: 153; (d) at least one oligonucleotides and/or PNA-oligomer having a length of at least 9 or 16 nucleotides which is identical to or hybridises to a pre-treated nucleic acid sequence according to one of SEQ ID NO: 13 to SEQ ID NO: 60; SEQ ID NO: 84 to SEQ ID NO: 103, SEQ ID NO: 126 to SEQ ID NO: 153 and sequences complementary thereto; and optionally (e) instructions for use and interpretation of the kit results.

[0209] The kits may also contain other components such as buffers or solutions suitable for blocking, washing or coating, packaged in a separate container.

[0210] Additional aspects of the invention provide a kit for use in determining the presence of and/or diagnosing cell proliferative disorders, preferably those according to Table 2 (most preferably lung carcinoma). Particularly preferred is a lung cancer selected from the group consisting of lung adenocarcinoma; large cell lung cancer; squamous cell lung carcinoma; small cell lung carcinoma.

[0211] Said kits preferably comprise: a means for measuring the level of transcription of at least one gene or genomic sequence selected from the group consisting of PTGER4; RUNX1; EVX2; EVX-1; SHOX2; SEQ ID NO: 6; CN027; LRAT; IL-12RB1; TFAP2C; BCL2; ARIDA5A (SEQ ID NO: 12); EN2; PRDM14; SEQ ID NO: 81; ARID5A (SEQ ID NO: 82); VAX1; ONECUT1; FOXL-2, TFAP2E and BARHL2 and a means for determining methylation status or level of at least one gene or genomic sequence selected from the group consisting of PTGER4; RUNX1; EVX2; EVX-1; SHOX2; SEQ ID NO: 6; CN027; LRAT; IL-12RB1; TFAP2C; BCL2; ARIDA5A (SEQ ID NO: 12); EN2; PRDM14; SEQ ID NO: 81; ARID5A (SEQ ID NO: 82); VAX1; ONECUT1; FOXL-2, TFAP2E and BARHL2 (including promoter or regulatory elements thereof) and EN2-2, EN2-3 and SHOX2-2.

[0212] Typical reagents (e.g., as might be found in a typical COBRA™-based kit) for COBRA™ analysis may include, but are not limited to: PCR primers for at least one gene or genomic sequence selected from the group consisting of PTGER4; RUNX1; EVX2; EVX-1; SHOX2; SEQ ID NO: 6; CN027; LRAT; IL-12RB1; TFAP2C; BCL2; ARIDA5A (SEQ ID NO: 12); EN2; PRDM14; SEQ ID NO: 81; ARID5A (SEQ ID NO: 82); VAX1; ONECUT1; FOXL-2, TFAP2E and BARHL2 (including promoter or regulatory elements thereof) and EN2-2, EN2-3 and SHOX2-2 and/or their bisulfite converted sequences; restriction enzyme and appropriate buffer; gene-hybridization oligo; control hybridization oligo; kinase labeling kit for oligo probe; and labeled nucleotides. Typical reagents (e.g., as might be found in a typical MethyLight™-based kit) for MethyLight™ analysis may include, but are not limited to: PCR primers for the bisulfite converted sequence of at least one gene or genomic sequence selected from the group consisting of PTGER4; RUNX1; EVX2; EVX-1; SHOX2; SEQ ID NO: 6; CN027; LRAT; IL-12RB1; TFAP2C; BCL2; ARIDA5A (SEQ ID NO: 12); EN2; PRDM14; SEQ ID NO: 81; ARID5A (SEQ ID NO: 82); VAX1; ONECUT1; FOXL-2, TFAP2E and BARHL2 (including promoter or regulatory elements thereof) and EN2-2, EN2-3 and SHOX2-2; bisulfite specific probes (e.g. TaqMan™ or Lightcycler™); optimized PCR buffers and deoxynucleotides; and Taq polymerase.

[0213] Typical reagents (e.g., as might be found in a typical Ms-SNuPE™-based kit) for Ms-SNuPE™ analysis may include, but are not limited to: PCR primers for specific gene (or bisulfite treated DNA sequence or CpG island); optimized PCR buffers and deoxynucleotides; gel extraction kit; positive control primers; Ms-SNuPE™ primers for the bisulfite converted sequence of at least one gene or genomic sequence selected from the group consisting of PTGER4; RUNX1; EVX2; EVX-1; SHOX2; SEQ ID NO: 6; CN027; LRAT; IL-12RB1; TFAP2C; BCL2; ARIDA5A (SEQ ID NO: 12); EN2; PRDM14; SEQ ID NO: 81; ARID5A (SEQ ID NO: 82); VAX1; ONECUT1; FOXL-2, TFAP2E and BARHL2 (including promoter or regulatory elements thereof) and EN2-2, EN2-3 and SHOX2-2; reaction buffer (for the Ms-SNuPE reaction); and labelled nucleotides.

[0214] Typical reagents (e.g., as might be found in a typical MSP-based kit) for MSP analysis may include, but are not limited to: methylation-specific and unmethylation-specific PCR primers for the bisulfite converted sequence of at least one gene or genomic sequence selected from the group consisting of PTGER4; RUNX1; EVX2; EVX-1; SHOX2; SEQ ID NO: 6; CN027; LRAT; IL-12RB1; TFAP2C; BCL2; ARIDA5A (SEQ ID NO: 12); EN2; PRDM14; SEQ ID NO: 81; ARID5A (SEQ ID NO: 82); VAX1; ONECUT1; FOXL-2, TFAP2E and BARHL2 (including promoter or regulatory elements thereof) and EN2-2, EN2-3 and SHOX2-2, optimized PCR buffers and deoxynucleotides, and specific probes.

[0215] Moreover, an additional aspect of the present invention is an alternative kit comprising a means for determining methylation (status or level) of at least one gene or genomic sequence selected from the group consisting of PTGER4; RUNX1; EVX2; EVX-1; SHOX2; SEQ ID NO: 6; CN027; LRAT; IL-12RB1; TFAP2C; BCL2; ARIDA5A (SEQ ID NO: 12); EN2; PRDM14; SEQ ID NO: 81; ARID5A (SEQ ID NO: 82); VAX1; ONECUT1; FOXL-2, TFAP2E and BARHL2 (including promoter or regulatory elements thereof) and EN2-2, EN2-3 and SHOX2-2, wherein said means comprise preferably at least one methylation specific restriction enzyme; one or a plurality of primer oligonucleotides (preferably one or a plurality of primer pairs) suitable for the amplification of a sequence comprising at least one CpG dinucleotide of a sequence selected from SEQ ID NO: 1 to SEQ ID NO: 12; SEQ ID NO: 79 to SEQ ID NO: 83; SEQ ID NO: 119 to SEQ ID NO: 125 and optionally instructions for carrying out and evaluating the described method of methylation analysis. In one embodiment the base sequence of said oligonucleotides are identical, are complementary, or hybridise under stringent or highly stringent conditions to an at least 18 base long segment of a sequence selected from SEQ ID NO: 1 to SEQ ID NO: 12; SEQ ID NO: 79 to SEQ ID NO: 83 and SEQ ID NO: 119 to SEQ ID NO: 125.

[0216] In further embodiments, said kit may comprise one or a plurality of oligonucleotide probes for the analysis of the digest fragments, preferably said oligonucleotides are identical, are complementary, or hybridise under stringent or highly stringent conditions to an at least 16 base long segment of a sequence selected from SEQ ID NO: 1 to SEQ ID NO: 12; SEQ ID NO: 79 to SEQ ID NO: 83 and SEQ ID NO: 119 to SEQ ID NO: 125.

[0217] In preferred embodiments, the kit may comprise additional reagents selected from the group consisting: buffer (e.g. restriction enzyme, PCR, storage or washing buffers); DNA recovery reagents or kits (e.g., precipitation, ultrafiltration, affinity column) and DNA recovery components.

[0218] In a further alternative embodiment, the kit may contain, packaged in separate containers, a polymerase and a reaction buffer optimised for primer extension mediated by the polymerase, such as PCR. In another embodiment of the invention the kit further comprising means for obtaining a biological sample of the patient. In a preferred embodiment the kit comprises: (a) a methylation sensitive restriction enzyme reagent; (b) a container suitable for containing the said reagent and the biological sample of the patient; (c) at least one set of oligonucleotides one or a plurality of nucleic acids or peptide nucleic acids which are identical, are complementary, or hybridise under stringent or highly stringent conditions to an at least 9 base long segment of a sequence selected from SEQ ID NO: 1 to SEQ ID NO: 12; SEQ ID NO: 79 to SEQ ID NO: 83; SEQ ID NO: 119 to SEQ ID NO: 125 and optionally (d) instructions for use and interpretation of the kit results.

[0219] In an alternative preferred embodiment the kit comprises: (a) a methylation sensitive restriction enzyme reagent; (b) a container suitable for containing the said reagent and the biological sample of the patient; (c) at least one set of primer oligonucleotides suitable for the amplification of a sequence comprising at least one CpG dinucleotide of a sequence selected from SEQ ID NO: 1 to SEQ ID NO: 12; SEQ ID NO: 79 to SEQ ID NO: 83; SEQ ID NO: 119 to SEQ ID NO: 125 and optionally (d) instructions for use and interpretation of the kit results.

[0220] In an alternative embodiment the kit comprises: (a) a methylation sensitive restriction enzyme reagent; (b) a container suitable for containing the said reagent and the biological sample of the patient; (c) at least one set of primer oligonucleotides suitable for the amplification of a sequence comprising at least one CpG dinucleotide of a sequence selected from SEQ ID NO: 1 to SEQ ID NO: 12; SEQ ID NO: 79 to SEQ ID NO: 83; SEQ ID NO: 119 to SEQ ID NO: 125 (d) at least one set of oligonucleotides one or a plurality of nucleic acids or peptide nucleic acids which are identical, are complementary, or hybridise under stringent or highly stringent conditions to an at least 9 base long segment of a sequence selected from SEQ ID NO: 1 to SEQ ID NO: 12; SEQ ID NO: 79 to SEQ ID NO: 83 and SEQ ID NO: 119 to SEQ ID NO: 125 and optionally (e) instructions for use and interpretation of the kit results.

[0221] The kit may also contain other components such as buffers or solutions suitable for blocking, washing or coating, packaged in a separate container.

[0222] The invention further relates to a kit for use in providing a diagnosis of the presence or absence of cell proliferative disorders, preferably those according to Table 2 (most preferably lung carcinoma), in a subject by means of methylation-sensitive restriction enzyme analysis. Said kit comprises a container and a DNA microarray component. Said DNA microarray component being a surface upon which a plurality of oligonucleotides are immobilized at designated positions and wherein the oligonucleotide comprises at least one CpG methylation site. At least one of said oligonucleotides is specific for at least one gene or genomic sequence selected from the group consisting of PTGER4; RUNX1; EVX2; EVX-1; SHOX2; SEQ ID NO: 6; CN027; LRAT; IL-12RB1; TFAP2C; BCL2; ARIDA5A (SEQ ID NO: 12); EN2; PRDM14; SEQ ID NO: 81; ARID5A (SEQ ID NO: 82); VAX1; ONECUT1; FOXL-2, TFAP2E and BARHL2 (including promoter or regulatory elements thereof) and EN2-2, EN2-3 and SHOX2-2 and comprises a sequence of at least 15 base pairs in length but no more than 200 bp of a sequence according to one of SEQ ID NO: 1 to SEQ ID NO: 12; SEQ ID NO: 79 to SEQ ID NO: 83 and SEQ ID NO: 119 to SEQ ID NO: 125. Preferably said sequence is at least 15 base pairs in length but no more than 80 bp of a sequence according to one of SEQ ID NO: 1 to SEQ ID NO: 12; SEQ ID NO: 79 to SEQ ID NO: 83 and SEQ ID NO: 119 to SEQ ID NO: 125. It is further preferred that said sequence is at least 20 base pairs in length but no more than 30 bp of a sequence according to one of SEQ ID NO: 1 to SEQ ID NO: 12; SEQ ID NO: 79 to SEQ ID NO: 83 and SEQ ID NO: 119 to SEQ ID NO: 125.

[0223] Said test kit preferably further comprises a restriction enzyme component comprising one or a plurality of methylation-sensitive restriction enzymes.

[0224] In a further embodiment said test kit is further characterized in that it comprises at least one methylation-specific restriction enzyme, and wherein the oligonucleotides comprise a restriction site of said at least one methylation specific restriction enzymes.

[0225] The kit may further comprise one or several of the following components, which are known in the art for DNA enrichment: a protein component, said protein binding selectively to methylated DNA; a triplex-forming nucleic acid component, one or a plurality of linkers, optionally in a suitable solution; substances or solutions for performing a ligation e.g. ligases, buffers; substances or solutions for performing a column chromatography; substances or solutions for performing an immunology based enrichment (e.g. immunoprecipitation); substances or solutions for performing a nucleic acid amplification e.g. PCR; a dye or several dyes, if applicable with a coupling reagent, if applicable in a solution; substances or solutions for performing a hybridization; and/or substances or solutions for performing a washing step.

[0226] The described invention further provides a composition of matter useful for detecting, or for diagnosing cell proliferative disorders, preferably those according to Table 2 (most preferably lung carcinoma). Particularly preferred is a lung cancer selected from the group consisting of lung adenocarcinoma; large cell lung cancer; squamous cell lung carcinoma; small cell lung carcinoma.

[0227] Said composition preferably comprises at least one nucleic acid 18 base pairs in length of a segment of the nucleic acid sequence disclosed in SEQ ID NO: 13 to SEQ ID NO: 60; SEQ ID NO: 84 to SEQ ID NO: 103, SEQ ID NO: 126 to SEQ ID NO: 153, and one or more substances taken from the group comprising: 1-5 mM Magnesium Chloride, 100-500 μM dNTP, 0.5-5 units of taq polymerase, bovine serum albumen, an oligomer in particular an oligonucleotide or peptide nucleic acid (PNA)-oligomer, said oligomer comprising in each case at least one base sequence having a length of at least 9 nucleotides which is complementary to, or hybridizes under moderately stringent or stringent conditions to a pretreated genomic DNA according to one of the SEQ ID NO: 13 to SEQ ID NO: 60; SEQ ID NO: 84 to SEQ ID NO: 103, SEQ ID NO: 126 to SEQ ID NO: 153 and sequences complementary thereto. It is preferred that said composition of matter comprises a buffer solution appropriate for the stabilization of said nucleic acid in an aqueous solution and enabling polymerase based reactions within said solution. Suitable buffers are known in the art and commercially available.

[0228] In further preferred embodiments of the invention said at least one nucleic acid is at least 50, 100, 150, 200, 250 or 500 base pairs in length of a segment of the nucleic acid sequence disclosed in SEQ ID NO: 13 to SEQ ID NO: 60; SEQ ID NO: 84 to SEQ ID NO: 103, SEQ ID NO: 126 to SEQ ID NO: 153.

TABLE 1

| | | Pretreated | Pretreated | Pretreated | Pretreated |
|---|---|---|---|---|---|
| | | methylated | methylated | unmethylated | unmethylated |
| | | sequence | strand | sequence | sequence |
| | Genomic | (sense) | (antisense) | (sense) | (antisense) |
| Gene | SEQ ID NO: | SEQ ID NO: | SEQ ID NO: | SEQ ID NO: | SEQ ID NO: |
| RUNX1 | 1 | 13 | 14 | 37 | 38 |
| EVX-2 | 2 | 15 | 16 | 39 | 40 |
| EVX-1 | 3 | 17 | 18 | 41 | 42 |
| PTGER4 | 4 | 19 | 20 | 43 | 44 |
| SHOX2 | 5 | 21 | 22 | 45 | 46 |
| No | 6 | 23 | 24 | 47 | 48 |
| annotated | | | | | |
| gene, | | | | | |
| sequence | | | | | |
| located | | | | | |
| between | | | | | |
| TIM14 & | | | | | |
| SOX-2 | | | | | |
| genes | | | | | |
| CN027 | 7 | 25 | 26 | 49 | 50 |
| LRAT | 8 | 27 | 28 | 51 | 52 |
| IL-12RB1 | 9 | 29 | 30 | 53 | 54 |
| TFAP2C | 10 | 31 | 32 | 55 | 56 |
| BCL2 | 11 | 33 | 34 | 57 | 58 |
| ARID5A | 12 | 35 | 36 | 59 | 60 |
| Homeobox | 79 | 84 | 85 | 94 | 95 |
| protein | | | | | |
| engrailed-2 | | | | | |
| (Hu-En-2); | | | | | |
| EN2; HME2 | | | | | |
| PR domain | 80 | 86 | 87 | 96 | 97 |
| zinc finger | | | | | |
| protein 14 | | | | | |
| (PR domain- | | | | | |
| containing | | | | | |
| protein 14); | | | | | |
| PRDM14 | | | | | |
| Chromosomal | 81 | 88 | 89 | 98 | 99 |
| location | | | | | |
| (NCBI36) | | | | | |
| chromosome: | | | | | |
| 15 | | | | | |
| bp45139161 | | | | | |
| to 45139783 | | | | | |
| AT rich | 82 | 90 | 91 | 100 | 101 |
| interactive | | | | | |
| domain 5A; | | | | | |
| ARID5A | | | | | |
| Ventral | 83 | 92 | 93 | 102 | 103 |
| anterior | | | | | |
| homeobox 1; | | | | | |
| VAX1 | | | | | |
| SHOX2-2 | 119 | 126 | 127 | 140 | 141 |
| EN2-2 | 120 | 128 | 129 | 142 | 143 |
| EN2-3 | 121 | 130 | 131 | 144 | 145 |
| ONECUT 1 | 122 | 132 | 133 | 146 | 147 |
| FOXL2 | 123 | 134 | 135 | 148 | 149 |
| TFAP2E | 124 | 136 | 137 | 150 | 151 |
| BARHL2 | 125 | 138 | 139 | 152 | 153 |

TABLE 2

| Gene | Preferred disorder |
|---|---|
| RUNX1 | Cancers, preferably lung, |
| | prostate and/or breast |
| EVX2 | Cancers, preferably lung |
| EVX-1 | Cancers |
| PTGER4 | Cancers, preferably lung, |
| | prostate and/or breast |
| SHOX2 | Cancers, preferably lung, |
| | breast and/or bladder |
| none; upstream: TIM14/downstream: | Cancers, preferably prostate |
| SOX-2 (referred to as SEQ ID NO 6) | |
| CN027 | Cancers, preferably lung |
| | and/or prostate |
| LRAT | Cancers, preferably colon |
| IL-12RB1 | Cancers, preferably prostate |
| | and/or breast |
| TFAP2C | Cancers |
| BCL2 | Cancers, preferably lung |
| AT rich interactive domain 5A; ARID5A | Cancers, preferably lung |
| (according to SEQ ID NO 12) | |
| Homeobox protein engrailed-2 (Hu-En-2); | Cancers, preferably lung |
| EN2; HME2 | |
| PR domain zinc finger protein 14 (PR | Cancers, preferably lung |
| domain-containing protein 14); PRDM14 | |
| Chromosomal location (NCBI36) | Cancers, preferably lung |
| chromosome: 15 bp45139161 to 45139783 | |
| (referred to as SEQ ID NO 81) | |
| AT rich interactive domain 5A; ARID5A | Cancers, preferably lung |
| (according to SEQ ID NO: 82) | |
| Ventral anterior homeobox 1; VAX1 | Cancers, preferably lung |
| SHOX2-2 | Cancers, preferably lung |
| EN2-2 | Cancers, preferably lung |
| EN2-3 | Cancers, preferably lung |
| ONECUT1 | Cancers, preferably lung |
| FOXL2 | Cancers, preferably lung |
| TFAP2E | Cancers, preferably lung |
| BAHRL2 | Cancers, preferably lung |

TABLE 3A

| Gene/Genomic | Primer 1/ | Primer 2/ | Probe/ |
|---|---|---|---|
| region | SEQ ID NO: | SEQ ID NO: | SEQ ID NO: |
| SEQ ID NO: 6 | aaccgcaacgactaacaacg | Agggcgtttagttaattcgc/ | cgcgacgacaaaacgcccttt |
| | aa/64 | 65 | aaaaacgaa/66 |
| CN027 | cacgcacgatactaaacgcc/ | tcgatcgtgttggttgttc/68 | cgaccgcctaccgcttcataat |
| | 67 | | aacgt/69 |
| LRAT | acccgataaaaacatcgcgta/ | gttcgtgcgtttgtagttcgat/ | aacgcgaccaacgcttcaac |
| | 70 | 71 | gac/72 |
| TFAP2C | Tttttgttaagcggtttcggattt/ | ccgcctaaaaacgtctacg | taaaaactcgcgcaacaccgt |
| | 73 | caa/74 | accgtaaa/75 |
| EVX-1 | gttagtttttttttgtcgttttttt | tcgcctaaactcaactacac | gcgttcgggagtttcgtgagg/ |
| | ttcgt/76 | ga/77 | 78 |
| EVX2 | Cggttagttcgtatcggcg/ | Cgaatcaaatacgacgct | Tcgcgcgcctaaaaaaaaa |
| | 149 | accg/150 | attctaccg/151 |
| SHOX2 | Caaataatctccgtcccgc/ | Gttaatatggcgtgggcgt/ | Tacccgaccgaaatcgcacg |
| | 152 | 153 | aaca/154 |
| ARID5A | Cgaaccataaataaacgactc | Gggattcggcgtcggta/ | Cgacccgaacaaaaactcg |
| | tacga/155 | 156 | acgacc/157 |
| RUNX1 | Aaaaacgacgaaaacgcga/ | Tgcgcgtcgttgataacg/ | Tctaatacgcaacgcgccgc |
| | 158 | 159 | aa/160 |
| PTGER4 | Aacgattaacgaacctcacgc/ | Gtattgtagtcgcgagttatc | Ctatacgtccaacgtactctttt |
| | 161 | gaga/162 | acgcgctacc/163 |
| BCL2 | Gtggtatcgggttgagcgt/ | Ccaaaacctcgccgctac/ | Tttcgcggcggcgtcggggg/ |
| | 164 | 165 | 166 |
| IL-12RB1 | Ccccacaaactcgaaaacga | Ggaagttcggttttttttttc | Tcgaatcacgaaaaccccaa |
| | a/167 | gg/168 | aaaacataacga/169 |

TABLE 3B

| | Oligo | |
|---|---|---|
| Target sequence | SEQ ID | |
| (Genomic) | NO: | Sequence |
| SEQ ID NO: 79 | 104 | tatcgcggagattttcgagttttcgttg |
| Forward Primer | | |
| SEQ ID NO: 79 | 105 | ggggttgtttttcgggatt |
| Probe | | |
| SEQ ID NO: 79 | 106 | gataaccctaaaacgcaactcgaa |
| Reverse Primer | | |
| SEQ ID NO: 80 | 107 | cgtttcgtaaggagcgtgtt |
| Reverse Primer | | |
| SEQ ID NO: 80 | 108 | cgcgttgttcgcggttagtttcgt |
| Forward Primer | | |
| SEQ ID NO: 80 | 109 | cgacgttttcgcgtgg |
| Probe | | |
| SEQ ID NO: 81 | 110 | gttttgaaatttattagaataacgacgtt |
| Forward Primer | | |
| SEQ ID NO: 81 | 111 | ctttctaaaaataaccgaactatactacg |
| Reverse Primer | | ac |
| SEQ ID NO: 81 | 112 | tacggacgttcgcgggtcgtt |
| Probe | | |
| SEQ ID NO: 82 | 113 | agtaagttcgcgtagattcggttt |
| Probe | | |
| SEQ ID NO: 82 | 114 | taaaacgacgaaacgaccgat |
| Reverse Primer | | |
| SEQ ID NO: 82 | 115 | tcgtcgttttcgggttgtcgagtg |
| Forward Primer | | |
| SEQ ID NO: 83 | 116 | aaggaagtggaataaatcgtcgta |
| Probe | | |
| SEQ ID NO: 83 | 117 | aggcgtttttgttttttcggaaattcgaa |
| Forward Primer | | attc |
| SEQ ID NO: 83 | 118 | ctacgactaataccgtaaacgccta |
| Reverse Primer | | |

TABLE 3C
MSP ASSAYS

| Gene/Genomic | MSP-Amplicon/ | Forward Primer/ | Reverse Primer/ | Probe/ |
|---|---|---|---|---|
| region | SEQ ID NO: | SEQ ID NO: | SEQ ID NO: | SEQ ID NO: |
| ONECUT1 | gttttgaaatttattagaa | gttttgaaatttattagaat | ctttctaaaaataac | tacggacgttcgcgggtcgtt/ |
| | taacgacgttttaaaaa | aacgacgtt/159 | cgaactatactacg | 161 |
| | taaaggcgtagtaagt | | ac/160 | |
| | attttttttttcgttgtcgcg | | | |
| | ggttgaattacggacgt | | | |
| | tcgcgggtcgtttagttt | | | |
| | cgacggttcgtagggg | | | |
| | gcgcgcgtcgtagtcgt | | | |
| | agtatagttcggttattttt | | | |
| | agaaag/154 | | | |
| TFAP2E | tttagaagcggttttcgt | tttagaagcggttttcgtat | ccgaacgcttaccta | ttgcggtgggcgttttcgggtt/ |
| | atcgttgcggtgggcgt | c/170 | caatc/171 | 172 |
| | tttcgggtttcgatttcgtt | | | |
| | agcgtcgcggggtag | | | |
| | aggtatttggagttcgta | | | |
| | gggtttagatttgggttg | | | |
| | gaaaagtttcgttgattg | | | |
| | taggtaagcgttcgg/ | | | |
| | 155 | | | |

TABLE 3D
Heavy Methyl ASSAYS

| | | Forward | Reverse | Forward | Reverse | |
|---|---|---|---|---|---|---|
| Gene/ | | Primer/ | Primer/ | Blocker/ | Blocker/ | Probe/ |
| Genomic | HM-Amplicon/ | SEQ ID | SEQ ID | SEQ ID | SEQ ID | SEQ ID |
| region | SEQ ID NO: | NO: | NO: | NO: | NO: | NO: |
| FOXL-2 | ccaagacctgggcttgc | ccaaaaccta | gagaggggt | tacaacacca | ttgggaagat | ccgccgaaaac |
| | agcgccgccaacaggc | aacttacaac/ | t agtagt/ | ccaacaaacc | tttggtttgg | acgaaacggcg |
| | ccggggacacgaggcg | 162 | 163 | caaaaacaca | agt/165 | ggagaggggtta |
| | ctccaggccggggtcttc | | | a/164 | | gtagt/166; |
| | ccggctgctggcccctct | | | | | cccgggaagattt |
| | cgctccccacccgctgg | | | | | tggtttggagccc |
| | cggcgcctcggtcgccc | | | | | gggccaaaacct |
| | gcaattgacccaacccg | | | | | aa acttacaac/ |
| | cttcctgcgtttgcccctca | | | | | 167; |
| | ggtt tcc/157 | | | | | ctccaaaccaaa |
| | | | | | | atcttccc/168; |
| | | | | | | ccgaaaacacg |
| | | | | | | aaacgctc/169 |
| TFAP2E | aaacccaaacctaaatt | aaacccaaac | ggaagtgtgt | gtaaagtgtt | | aaaaacttcgcta |
| | aaaaaaacttcgctaact | ctaaattaaa/ | ggtaaag/ | ggggttttgt | | actacaaacaaa |
| | acaaacaaacgtccga | 173 | 174 | ttggttgttt/ | | c/176 |
| | aaaaaacgaccaaacg | | | 175 | | |
| | aaaccccgacgctttacc | | | | | |
| | acacacttcc/158 | | | | | |

TABLE 3E
TSP ASSAYS

| Gene/Genomic | TSP PCR | Primer 1/ | Primer 2/ | Probe/ |
|---|---|---|---|---|
| region | Amplicon | SEQ ID NO: | SEQ ID NO: | SEQ ID NO: |
| BARHL2 | attgtttgttagtttttaagttaa | gttttgaaatttattaga | acatataacaaatata | ttggattattttaaat |
| | tcgtagtaataatcgttggatt | ataacgacgtt/177 | tttt atccaac/178 | gtggttaaaa/179 |
| | attttaaatgtggttaaaatc | | | |
| | gacgttggataaaattaattt | | | |
| | gttatatgt/156 | | | |

TABLE 4A

| | Tissue type | | | | | |
|---|---|---|---|---|---|---|
| | | | Large cell | Squamous cell | Small cell | |
| | All lung | Lung | lung | lung | lung | Prostate |
| | cancers | adenocarcinoma | cancer | carcinoma | carcinoma | carcinoma |
| PMR threshold (%) | >20 | >20 | >20 | >20 | >20 | >20 |
| N (total) | 61 | 21 | 12 | 21 | 7 | 10 |
| Gene | | | | | | |
| EVX2 | 76.8 | 52.4 | 75.0 | 90.5 | 100.0 | 60.0 |
| RUNX1 | 76.7 | 61.9 | 58.3 | 85.7 | 100.0 | 100.0 |
| PTGER4 | 66.1 | 66.7 | 66.7 | 61.9 | 71.4 | 100.0 |
| SHOX2 | 63.0 | 38.1 | 50.0 | 90.5 | 71.4 | 20.0 |
| SEQ ID NO: 6 | 68.2 | 38.1 | 33.3 | 95.2 | 100.0 | 100.0 |
| CN027 | 55.9 | 38.1 | 41.7 | 71.4 | 71.4 | 100.0 |
| LRAT | 41.7 | 42.9 | 33.3 | 42.9 | 42.9 | 30.0 |
| IL-12RB1 | 24.9 | 14.3 | 16.7 | 28.6 | 42.9 | 100.0 |
| EVX-1 | 47.4 | 38.1 | 33.3 | 57.1 | 57.1 | 100.0 |
| TFAP2C | 68.1 | 38.1 | 58.3 | 85.7 | 100.0 | 100.0 |
| BCL2 | 14.1 | 23.8 | 8.3 | 14.3 | 0.0 | 50.0 |

TABLE 4B

| | Tissue type | | | | | |
|---|---|---|---|---|---|---|
| | | | | Lung | | |
| | | | | diseasesd | | |
| | Colorectal | Breast | Bladder | (Not | Lung | |
| | cancer | carcinoma | carcinoma | cancer) | healthy | Blood |
| PMR threshold (%) | >20 | >20 | >20 | >5 | >5 | >0.2 |
| N (total) | 10 | 10 | 10 | 7 | 12 | 20 |
| Gene | | | | | | |
| EVX2 | 40.0 | 80.0 | 80.0 | 0.0 | 0.0 | 55.0 |
| RUNX1 | 20.0 | 80.0 | 60.0 | 0.0 | 0.0 | 0.0 |
| PTGER4 | 0.0 | 80.0 | 30.0 | 0.0 | 0.0 | 0.0 |
| SHOX2 | 60.0 | 80.0 | 70.0 | 0.0 | 0.0 | 10.0 |
| SEQ ID NO: 6 | 60.0 | 50.0 | 50.0 | 28.6 | 33.3 | 25.0 |
| CN027 | 90.0 | 70.0 | 70.0 | 0.0 | 8.3 | 25.0 |
| LRAT | 90.0 | 60.0 | 60.0 | 0.0 | 0.0 | 0.0 |
| IL-12RB1 | 0.0 | 80.0 | 30.0 | 85.7 | 100.0 | 0.0 |
| EVX-1 | 80.0 | 80.0 | 90.0 | 0.0 | 0.0 | 0.0 |
| TFAP2C | 100.0 | 100.0 | 60.0 | 14.3 | 0.0 | 25.0 |
| BCL2 | 0.0 | 10.0 | 60.0 | 0.0 | 0.0 | 0.0 |

TABLE 4C

| | Tissue type | | | | | |
|---|---|---|---|---|---|---|
| | | | Large cell | Squamous cell | Small cell | |
| | All lung | Lung | lung | lung | lung | Prostate |
| | cancers | adenocarcinoma | cancer | carcinoma | carcinoma | carcinoma |
| PMR threshold (%) | >20 | >20 | >20 | >20 | >20 | >20 |
| N (total) | 61 | 21 | 12 | 21 | 7 | 10 |
| SEQ ID NO: | | | | | | |
| SEQ ID NO: 79 | 38 | 29 | 33 | 57 | 29 | 55 |
| SEQ ID NO: 80 | 42 | 29 | 16 | 66 | 43 | 11 |
| SEQ ID NO: 81 | 24 | 24 | 8 | 28 | 29 | 11 |
| SEQ ID NO: 82 | 58 | 57 | 50 | 62 | 57 | 66 |
| SEQ ID NO: 83 | 45 | 24 | 33 | 66 | 57 | 25 |

TABLE 4D

| | Tissue type | | | | | | | | | |
|---|---|---|---|---|---|---|---|---|---|---|
| | | | | | | | | Lung | | |
| | | | | | | | | diseasesd | | |
| | Healthy | Colorectal | Healthy | Breast | Healthy | Bladder | Healthy | (Not | Lung | |
| | Prostate | cancer | Colon | carcinoma | breast | carcinoma | Bladder | cancer) | healthy | Blood |
| PMR threshold (%) | >5 | >20 | >5 | >20 | >5 | >20 | >5 | >5 | >5 | >0.2 |
| N (total) | 11 | 10 | 9 | 10 | 12 | 10 | 10 | 7 | 12 | 20 |
| SEQ ID NO: | | | | | | | | | | |
| SEQ ID NO: 79 | 0 | 40 | 0 | 50 | 0 | 40 | 0 | 0 | 0 | 0 |
| SEQ ID NO: 80 | 0 | 50 | 0 | 40 | 0 | 30 | 0 | 0 | 0 | 0 |
| SEQ ID NO: 81 | 0 | 40 | 0 | 20 | 0 | 10 | 0 | 0 | 0 | 0 |
| SEQ ID NO: 82 | 12 | 10 | 22 | 60 | 0 | 90 | 70 | 0 | 0 | 0 |
| SEQ ID NO: 83 | 12 | 60 | 0 | 50 | 0 | 60 | 10 | 0 | 0 | 0 |

| | |
|---|---|
| PTGER4 | RUNX1 |

| NSCLC | Sens | Spec | Sens | Spec |
|---|---|---|---|---|
| Bronchial | 52% | 91% | 39% | 91% |
| Lavage | | | | |
| Blood | 69% | 91% | — | — |
| Plasma | | | | |

| Gene/Marker | AUC | Sensitivity | Specificity |
|---|---|---|---|
| SHOX2.7 | 0.879 | 0.800 | 0.957 |
| SHOX2.15 | 0.886 | 0.625 | 0.957 |
| PTGER42 | 0.830 | 0.400 | 0.957 |
| PRDM14 | 0.867 | 0.400 | 0.957 |
| EN27 | 0.690 | 0.350 | 0.957 |
| BARHL2 | 0.766 | 0.400 | 0.957 |
| FOXL2 | 0.911 | 0.575 | 0.957 |
| EVX2 Assay 1 | 0.779 | 0.525 | 0.957 |
| EVX2 Assay 2 | 0.702 | 0.350 | 0.957 |

### EXAMPLES

### Example 1

[0229] Analysis of methylation of the genes/sequences according to Table 1 in multiple cancer and control tissue samples was carried out by means of a Real-Time MSP assay using the components according to Table 3.

Samples

| Tissue Type | No. of samples |
|---|---|
| Lung adenocarcinoma | 21 |
| Large cell lung cancer | 12 |
| Squamous cell lung carcinoma | 21 |
| Small cell lung carcinoma | 7 |
| Prostate carcinoma | 10 |
| Colorectal cancer | 10 |
| Breast carcinoma | 10 |
| Bladder carcinoma | 10 |
| Lung diseasesd (Not cancer) | 7 |
| Lung healthy | 12 |
| Blood/white blood cells | 20 |

### DNA Extraction and Bisulfite Treatment

[0230] The DNA was isolated from the all samples according to a modified protocol based on that disclosed in the Qiagen Genomic DNA Handbook (August 2001) (pg 28-31, 44-47). The DNA in the eluate was quantified and the eluate was treated according to the following bisulfite reaction.

[0231] The eluate was mixed with 354 μl of bisulfite solution (5.89 mol/l) and 146 μl of dioxane containing a radical scavenger (6-hydroxy-2,5,7,8-tetramethylchromane 2-carboxylic acid, 98.6 mg in 2.5 ml of dioxane). The reaction mixture was denatured for 3 min at 99° C. and subsequently incubated at the following temperature program for a total of 7 h min 50° C.; one thermospike (99.9° C.) for 3 min; 1.5 h 50° C.; one thermospike (99° C.) for 3 min; 3 h 50° C. The reaction mixture was subsequently purified by ultrafiltration using a Millipore Microcon™ column. The purification was conducted essentially according to the manufacturer's instructions. For this purpose, the reaction mixture was mixed with 300 μl of water, loaded onto the ultrafiltration membrane, centrifuged for 15 min and subsequently washed with 1×TE buffer. The DNA remains on the membrane in this treatment. Then desulfonation is performed. For this purpose, 0.2 mol/l NaOH was added and incubated for 10 min. A centrifugation (10 min) was then conducted, followed by a washing step with 1×TE buffer. After this, the DNA was eluted. For this purpose, the membrane was mixed for 10 minutes with 75 μl of warm 1×TE buffer (50° C.). The membrane was turned over according to the manufacturer's instructions. Subsequently a repeated centrifugation was conducted, with which the DNA was removed from the membrane. 10 μl of the eluate was utilized for the Lightcycler Real Time PCR assay.

### Reference Assay

[0232] The GSTP1 reference assay design makes it suitable for quantitating bisulfite converted DNA from different sources, including fresh/frozen samples, remote samples such as plasma or serum, and DNA obtained from archival specimen such as paraffin embedded material. The assay measures the total DNA independently from its methylation status, as long as no CpG is covered by the PCR oligonucleotides.

[0233] The following components were used in the reaction to amplify the control amplificate:
[0234] 10 μl of template DNA
[0235] 2 μl of FastStart LightCycler Mix for hybridization probes (Roche Diagnostics)
[0236] 3.5 mmol/l MgCl2 (Roche Diagnostics)
[0237] 0.60 μmol/l forward primer (SEQ ID NO: 61, TIB-MolBiol)
[0238] 0.60 μmol/l reverse primer (SEQ ID NO: 62, TIB-MolBiol)
[0239] 0.2 μmol/l probe (SEQ ID NO: 63, TIB-MolBiol)
   The following oligonucleotides were used in the reaction to amplify the control amplificate:

Primer1:

(SEQ ID NO: 61)

GGAGTGGAGGAAATTGAGAT
Primer2:

(SEQ ID NO: 62)

CCACACAACAAATACTCAAAAC
Probe:

(SEQ ID NO: 63)

FAM-TGGGTGTTTGTAATTTTTGTTTTGTGTTAGGTT-TAMRA

The assay was performed in the LightCycler 480 according to the following temperature-time-profile:
[0240] Activation 10 min at 95° C.
[0241] 50 cycles:
   [0242] 10 sec at 95° C.
   [0243] 30 sec at 56° C.
   [0244] 10 sec at 72° C.
      The detection was carried out during the annealing phase at 56° C. in channel for 530 nm with a target specific fluorescence probe (Seq ID-63).

### Methylation Specific Real Time PCR

[0245] The methylation specific real time PCR (MSP) reactions were performed on the bisulfite converted sample DNA. All MSP mastermixes were the Roche FastStart TaqMan Probe Master containing 300 nM ROX reference dye on the ABI7900 instrument. Each reaction contained 600 nM of the forward primer, 600 nM reverse primer, and 200 nM of the detection probe (see table with Seq-IDs of the markers). The reactions were performed in a final volume of 20 microL using the ABI7900 instrument with following temperature and time profile
[0246] Activation 10 min at 95° C.
[0247] 50 cycles:
   [0248] 15 sec at 95° C.
   [0249] 60 sec at 60° C.

### Data Interpretation

[0250] Calculation of DNA concentration. The CP (crossing point values) as calculated by the ABI7900 instrument software using a specific threshold was used for each assay to determine DNA concentration. The DNA concentration was calculated by reference of the CP value of each well to a calibration standard. The calibration standard was prepared from methylated bisulfite converted human DNA containing 10, 5, 2.5, 1, 0.4, 0.1, and 0.05 ng per reaction. The calibration curves was used for both the methylation specific marker assays and the C3 reference assay.

### Percentage Methylation

[0251] For each sample the detected percentage methylation was calculated as the measured concentration of DNA quantified using the methylation assays over the concentration of DNA in the sample as quantified by the C3 assay. The methylation ratios were calculated according to the PMR value method (Eads et al., Cancer Res. 2001 Apr. 15; 61(8): 3410-8, PMID 11309301) against the total DNA quantified by the C3 reference PCR.

[0252] Detection of methylation was determined at multiple different threshold levels, see Tables 4A to 4D).

[0253] Results are provided in Table 4A to 4D indicating the % of samples of each tissue class with methylation above the PMR (% methylation) threshold.

### Example 2

[0254] Analysis of methylation of the genes PTGER4 and RUNX1 was confirmed in cancer and control body fluid samples (plasma, bronchial lavage).

Samples

| Analysis Group | plasma | lavage |
|---|---|---|
| Lung adenocarcinoma | 50 | 50 |
| Benign lung disease | 50 | 50 |

DNA was extracted from plasma and bronchial lavage using MagnaPure (Roche Diagnostics)

[0255] For bronchial lavage (BL) samples the following preprocessing was performed: 1 ml of BL sample was centrifuged for 10 minutes at 8,000×g to pellet sample. After removing 900 ul of supernatant, the cells were resuspended in the remaining 100 ul of liquid. Then 130 ul of Bacteria Lysis Buffer and 20 ul of Proteinase K were added to the sample, which was vortexed for 10 seconds. After a quick spin down to collect the sample at the bottom of the tube it was incubated for 10 minutes at 60 C and for 15 minutes at 90 C. Then the sample was cooled down for 60 seconds and collected at the bottom of the tube by briefly centrifuging it.

Bisulfite treatment and reference assays were carried out, substantially as above. Methylation analysis was carried out by means of a Real-Time PCR HM assay.

### Example 3

[0256] The following analysis was performed to examine the methylation status of SHOX2, FOXL2, PTGER4, EVX2, EN2, PRDM14 and BARHL2 gene markers. Two additional loci each located within the genes EVX2 and SHOX2.15, respectively, were also tested.

[0257] DNA was first extracted from bronchial lavage samples and bisulfite treated. The treated DNA was analyzed using HeavyMethyl-based real-time PCR on the ABI PRISM 7900HT platform.

### Preanalytics

[0258] DNA extraction. Genomic DNA from unfixed bronchial lavage specimens was isolated using a QIAamp DNA Micro Kit (Qiagen, Hilden, Germany). The viscosity of the bronchial lavage samples was reduced, before DNA extraction, by adding 1,4-Dithiothreitol (DTT, Carl Roth, Germany) to a final concentration of 0.225% and incubating the samples at room temperature for at least 30 minutes or until the desired fluidity was obtained. After centrifugation at 3200×g for 12 minutes, the pellet was processed using a QIAamp DNA Micro Kit according to the manufacturer's protocol.

[0259] Bisulfite treatment. Bisulfite treatment of extracted sample DNA was performed using an EpiTect Kit (Qiagen, Hilden, Germany) according to the manufacturer's instructions with the following modifications. A fixed volume of 15 μl DNA from sample extractions was mixed with 5 μl water, 85 μl bisulfite mix and 35 μl protection buffer. Two elution steps were performed using 25 μl elution buffer each time.

### Analytics

[0260] Principle. The quantification of methylation of a specific locus is achieved via two PCRs. The first PCR is comprised of two gene specific primers and a gene specific probe, which detects DNA irrespective of its methylation state (quantification of total DNA). The second PCR is comprised of the same primers but contains a probe specific for methylated DNA and two blockers to suppress the amplification of unmethylated DNA.

| | |
|---|---|
| SHOX2 Primer 1: | |
| caaataatctccgtcccgc | (SEQ ID NO: 152) |
| SHOX2 Primer 2: | |
| gttaatatggcgtgggcgt | (SEQ ID NO: 153) |
| FOXL2 Forward primer: | |
| ccaaaacctaaacttacaac | (SEQ ID NO: 44) |
| FOXL2 Reverse primer: | |
| gagaggggttagtagt | (SEQ ID NO: 45) |
| FOXL2 Forward blocker: | |
| tacaacaccaccaacaaacccaaaaacacaa | (SEQ ID NO: 46) |
| FOXL2 Reverse blocker: | |
| ttgggaagattttggtttggagt | (SEQ ID NO: 47) |
| PTGER4 Primer 1: | |
| aacgattaacgaacctcacgc | (SEQ ID NO: 161) |
| PTGER4 Primer 2: | |
| gtattgtagtcgcgagttatcgaga | (SEQ ID NO: 162) |
| PRDM14 Forward Primer: | |
| cgtttcgtaaggagcgtgtt | (SEQ ID NO: 107) |
| PRDM14 Reverse Primer: | |
| cgcgttgttcgcggttagtttcgt | (SEQ ID NO: 108) |

For the BARHL2 assay (for BARHL2), the DNA restriction Enzyme Tsp509I is used instead of the blocking oligonucleotides. This enzyme specifically cuts unmethylated DNA after bisulfite-treatment leading to methylation specific amplification.

| | |
|---|---|
| For BARHL2 | (SEQ ID NO: 125) |
| Primer | |
| gttttgaaatttattagaataacgacgtt | (SEQ ID NO: 59) |
| Primer | |
| acatataacaaatatatttt atccaac | (SEQ ID NO: 60) |

[0261] Biomarkers/Assays. Assays were performed on the following markers using Scorpion probes: SHOX2.7, SHOX2.15, FOXL2, PTGER4 and PRDM14. In the case of SHOX2, two independent assays represented by SHOX2.7 and SHOX2.15 were performed on the same sequence.

SHOX2 Probe:

(SEQ ID NO: 154)

tacccgaccgaaatcgcacgaaca
FOXL2 Methylation-specific Probe:

(SEQ ID NO: 48)

ccgccgaaaacacgaaacggcgggagaggggttagtagt
FOXL2 Total DNA Probe:

(SEQ ID NO: 49)

cccgggaagattttggtttggagcccgggccaaaacctaaacttacaac
PTGER4 Probe:

(SEQ ID NO: 163)

ctatacgtccaacgtactcttttacgcgctacc
PRDM14 Probe:

(SEQ ID NO: 109)

cgacgttttcgcgtgg

Assays were performed on the following markers using TaqMan probes: BARHL2, EVX2 Assay 1, EVX2 Assay 2 and EN2.7. For the marker EVX2, two assays were conducted on the same sequence: Assay 1 and Assay 2.

| | |
|---|---|
| BARHL2 Probe: | |
| ttggattattttaaatgtggttaaaa | (SEQ ID NO: 61) |
| EVX2 Probe: | |
| tcgcgcgcctaaaaaaaaaattctaccg | (SEQ ID NO: 151) |
| EN2 Probe: | |
| ggggttgtttttcgggatt | (SEQ ID NO: 105) |

Primers for the EVX2 and EN2 reactions:

| | |
|---|---|
| EVX2 Primer 1: | |
| cggttagttcgtatcggcg | (SEQ ID NO: 149) |
| EVX2 Primer 2: | |
| cgaatcaaatacgacgctaccg | (SEQ ID NO: 150) |
| EN2 Forward Primer: | |
| tatcgcggagattttcgagttttcgttg | (SEQ ID NO: 104) |
| EN2 Reverse Primer: | |
| gataaccctaaaacgcaactcgaa | (SEQ ID NO: 106) |

[0262] Heavy Methyl based real-time PCRReal-time PCR experiments were performed using the Applied Biosystems ABI PRISM 7900HT instrument. Each real-time assay for one biomarker consisted of two independent reactions: a reference reaction for quantification of total input DNA and a HM-reaction for quantification of methylated target template. The reference assay was composed of two methylation-unspecific oligonucleotides and a methylation unspecific probe, whereas the HM-assay consisted of the same two methylation-unspecific primers, but in addition, two methylation-specific blockers (one for each primer) and a methylation-specific probe. For the biomarker BARHL2, the DNA restriction Enzyme Tsp509I was used instead of the blocking oligonucleotides. This enzyme specifically cuts unmethylated DNA during amplification after bisulfite-treatment. As a result, the unmethylated DNA is not amplified.

[0263] Two different probe systems were used for RT-PCR analysis, depending on the biomarker/assay. For SHOX2.7, SHOX2.15, FOXL2, PTGER4 and PRDM14 Scorpion probes consisting of a methylation-unspecific primer part and a methylation-specific probe part were used. The Scorpions contained BHQ1 as quencher and 6-FAM as fluorescent reporter. For the markers BARHL2, EVX2, EVX2 and EN2.7 TaqMan probes with BHQ1 and 6-FAM were used as detection system. Each assay was tested on 86 BL samples (40 cancer, 46 benign lung disease). Several PCR controls were included on each PCR plate. The controls contained 50 ng of bisulfit-treated Sperm DNA (0% BisStd), which is usually unmethylated, 0.5 ng methylated Chemicon DNA in 50 ng Sperm DNA (1% BisStd) and non template controls (NTCs). These controls were used to monitor the general RT-PCR performance and to define concentration limits for sample exclusion (see Data and Statistical analyses).

The 20 μl PCR reactions contained the following:

| | | |
|---|---|---|
| 0.25 | μl | bisulfite treated sample DNA (no prior determination of |
| | | concentration) |
| 10 | μl | QuantiTect Multiplex PCR NoROX mixture (Qiagen, Hilden) |
| 0.3 | μM | unspecific forward and reverse primer and either |
| 0.3 | μM | TaqMan probe or |
| 0.15 | μM | Scorpion probe. |

[0264] When a Scorpion probe was used in the experiment, the concentration of the respective non-probe primer was reduced to 0.15 μM. TaqMan probe concentration was 0.30 μM. For HM-reactions, blockers where added to a final concentration of 1 μM each. For Tsp509I-based assay, 1 U of restriction enzyme was used for the methylation-specific amplification.

[0265] Thermocycling conditions were as follows: an initial denaturation at 95° C. for 15 minutes followed by 50 cycles of 95° C. for 15 seconds and a annealing/denaturation step at 56° C. for 30 seconds (SHOX2: 580C). Single fluorescent detection was performed during the annealing/elongation step.

### Clinical Samples

[0266] Number of clinical samples: 86
Cancer samples: 40
Benign samples: 46

The application's sequence listing, which the Patent Office published only in electronic form, follows.

SEQUENCE LISTING (179 sequences)

SEQ ID NO: 1 - DNA, 3905 bp, Homo Sapiens
ttcaaaaaagcagatccgaagatgtttaaagtaataatggtgctgttagaatggtgctccctctccctcccaggggatgactttgaaggacactacaataacagatgtgtaaattctgaaatatatggctaaaatgaggtttattattttctagtcaccacttagacatcttttagtcatttgtttatgacagtttataaatgagaaagaagtccatttaaaatatctccatgaggacctcaaggtaaataataggaatcgatcattcatcaatctggcctggccccggcccactgaagaaagttccttcttgagtgcattcaaagctctcatggtccagccctgttcaacctgagcagcatcctatctgctcctcccccagacgttccgatgccctgcaccagattcaagagagagccaagttccccaacaggctatgcacgtggctattaacacccagcacacgctatccctggccagctctctccttcttccctaagaattaaacattctttggcctgagttttcctcctttatgtcaccataaagttgagttattcattattagggtctatacatgagtagccaaaatatacgggtctctatatttaggtcaaggggccttcagcaggagaacatgaataattaggagtgaggccatgagacagaggaagaaaagctcataggaatgggaagacagcctctcagatgagaggtgtgcggagtgattgctgtgaggaattgctcaataggaaagttagccaacctgaggacgtttctaggggaggaaaagggaaactcatatggttctctgctaattcttaaaaataaggtagattcttactcatctagggtgcttgctcgttatgaacacaggaagattaaggaatgagtatggactgtttctactctatgttttcggacaagaagaataataaaaaagcactgggtagctggaacaactgcagaggccccaacaatgatggagactttctggtgcaccgtggcacaggggtctcttccaaagggactcaatcaaccccaacaggcatcatcttctgtgactcaagatgtcctttttaggagtgcttgtactttttaatgctcagagaagttcgtattactgattcgggaacactgagtttttcagctcctgtaaaactattttcaggtttattttcaagtacattctttacctcggggggtcaaatcttttggtttccagtgaatatcgtggttatacctgtggttacccactgacttctcatctgcctagcttatctgataacaggcaaatggggaaagaggctttaatacccctcaaaaggggaagattgataattagttattcaccgcatagaatcaggccaggtcaactctctccaagaagaaaagcaatctggatattgcactttggggtcccttttcattttggcattacaggcctcatgaggatgtagtctttctgtatttctttctttctttttaaattgttatttatttatttattttaaccaggtcaaagcattacatactgcagaagagaaagcaacttcagcttctcttaaacggtgtcattttcatgacagctcgtaaattttggcctcctatgggtccaggatctgcgcgcatccgcccggggacttgttggtggatccatccctcatggcggagcagcaaggggatcctttagaaaaagcaatgggcgaagtaactgaaagagcgacgcagaaagcaacagccagaaacggcggggacgcgagcggcccagacaggaagggaggcggtggcgcagctctggtgcgcagcgcgccgcagcgacggaacttctgcaaaagctgcctgcccgcgcgttatcagcggcgcgcaggcctgtggttttctcgctctcgcaaccctgctttaactgccggtttatttttcgacaaacaggatgcctccatctgaggctgtcagcatcccaggctctttgaaagaaaagaagtagagcggccccaccctagaggcaaggacggggtctgtgtcaagaggcttcccagagaagtgaaaactctgcaggtgcagccgctgggagagcatcaagaagggcagggtggaggggcagggggcgaagggagggggtgaagcccgcaccctacccccacatgaaactgattccactaccccatctctgcaagcgtccagaggcagagaggccaacatttcggggacagcttggaggcgggagatttaggcagggctccttaaacttttatgtgcatgaaaatcaggccaatcacggggctcttgagcaaatggggacgatgattcagcaggtctgggctgaggcctcagattctgcacttctaacaagttcccaggtggtagtgatgctgccagtccaaagaccacactgtgaatagcaaggcgtcgtcgggacagtctgctttagagtaaaacctaatagatgtgcaaatatttaaaccaagctgtatttattcctgaggccctggtttaactggagccaccttgctaatggaaaatggaaaatgaaattcctttaggttccaaagggaaggaaagtttgaaatggttaaggtatttaaaaaatcctagttgggagtggccttggggattcgggagagttgaagttaggttctgagccaagagatgggggaggaagggtgggatgtggcaaataaatataaacacacacacacaaaccccagcccaaccacaggttctttcctatcaatgaaacatttgcatcttgcaggtagaactcacacgtgtccacatttttcagaagttgaatggttttgtgtaatggtacagaatttggagcccatatttgaatattctagatccaatgttatctcagactggctttaggatcttgtggcctacatttaaaaatgcatgtttctgagtcatgtttaattagtagtagtatctgagaactgagagactagactaagaaatccatggtatatgaataaaatctccagacagcagctagaacatagaggtccctccagaggcagtgccagttgtcagctgtaaaaataggttctgctcagttttgcttaggcctgaagtttcctgaagatttcatttagacttcatcaaaaccagtcaaagacttcctgttacagaaaggttcttaaagtatggctgggactacagggctattaagatgcagattcttgggcctctctgcctcactcatcatggtttctcagggtgggtgccgggaacctgcattttaacaaacgctttgaggattcttatgtactgccaagtttaggagtccctggtctgcaggtttaagttcaaccttctcactgcagcattcaaagacctggcttcaattttgctgttcacaggcgagcctcagtgacttcctcactgccctctgagcactcctggagccacctggctgcctcattcatttcttctcctctgtctttccccagccctggaataaaatgacttccatcttcctctccgaactctcttcagatcatggcttcccactcagcaagcagttactttcctggtctgccactgctgtggtattaatgataggccactcgattctcattttgttgactgaatatttctcatgcttaggctttgcctccctgaccagacagtaagttctctgaagccatttcatgctatataatctttatgttcaagactactttctaacgcagtgtcatgtccacatggatcattcagtaaatttaccgatggcttatctatcaccaacatgttttacagagtgttattaagcagggacactctctatgggtctaggatcagaagaagctgggaagagaaatggggtagtggtgagagtgtcatgagaatctggttatacagtcatcaaagacacagaggaagtgggaaaaagggagtgt

SEQ ID NO: 2 - DNA, 5338 bp, Homo Sapiens
ggcaacctcttttgccatcactttttgcataaaatatgcaagatgcttccattccatcagcactgaaaccaaagaccaaaagagagaaaggtgttggaccgaaaaggaggcggcgcaacggccaccccttccagcacctcggctttgtccttcccggggaaggcggccacatccctacccgccttgctcctgaacgtagtaaacaatctcacaaacaaccaccgctgcccacgctctccatccgtcctcccggccttatcagacctccgttctcccgcactcttcgggcagggtccctaataagctcaggctgaaagaacgtttgccacctcccccaccctcgttgaaagaaaaggaagaaaaacagcagcagcgagaaacctccggggcgactcctcccccgcccccaagcaccagcgcacagcatccccctctgtctttgttgtggttctccgttgcttcgggccacgccgttcagccaagcaacccggacctgagagtgcacagccaggactagcttagggggcgaggggttggtctttgggaaaccaagcgctcaggacagaggtggaaagtgggtcccgggagccagaaaagagagagaagggcagacggctgggtggcaaatacaaaaatagaaataatttagggggatgcccgccaggcttttgcgcctgctccttctcccccaattcggagcaggttcccttcggcctcccgcgccccggggcgccccctggcggcagcggcagcagcgggcaacgcgcggagggctcagggggcgcacaggggactcccgggcacactcagagaggcgggcgcggccccctggcggtggcgacgtagttatctggtgagcggagcctcgtccctctggtccggcgggctcacggccgtcttactaagcaccgcggccgagtagggcaggaagccgctctcggaacgcggcgccgccgcgctgcagccgaagtccgagcctcccccggccccggcgcccccgccgccgccgccaccaccaccaccgccgccgccaccgccaccccgggaacccagggctgcggcagctgctgccgcggctgccgccgccgactgactgctgtggcaactgaggcacgagcagggtgcagagccgccgctggggggcgcgccggccgccgccgccgaggaggccgcagccgctgcggctgccgcggctgccgcggcagaggccgcgctgttgagccccgcggcggccgcgggagcctggtagagaccagggtggcggaagctacacagcagctccggccgagagtaggggtgcgagagggcgcggaaggtgtccagtggccggatggaagtagcgaagggcgacgaagccgcggccgccgcgcctgaggctgcagccgcggccgccgccgccgtgacgcccacgtgcgggtagtagtgcagcggcacgtgcgagtggaaggggtagggcaggcttccggtggcggccgcgtgcgtcatcatgtaggtgtagaagctggggtcggctgggtgcggccaggacatggccaggcgctgccgcttgtccttcatgcgccggttctggaaccacacctgcggggagagacgcgccgcagcctgggttagggagcgccccgtgttcccagctcctgtcccaggacctctgccccttccggacctctgaatggcttggtctacttctctccgaccaagcccaaccccgagtaccctgtggtctcccagctgggaaagtgtggacggcagtgtgtggaccgccgtgggcacaccgtcctcaacgaagagggtcctctcccccgcgtccggctgctgctgctcctcaggcttttattcccttacttcttgctgcacttttttgtcccaatccaacctttcctctccctcccgccacccaccagtgccggtctcgctgagcacccgtctctcaatcccaggatttgtacggggattctgggcagcctttgaagagaggctgccgctcagcttttctgagaggtcgccgcgcgaagtcttgagccctccgaactgcaaggacctgcccctaggggcacgggtccgattttgatattgaagggatgattttgttggaatcgtttgccttaaatgagtgggtagagcaatgtctccataaacggggaaggggacgtttccacccctcccaacactatctaataaagacatcattcgtcacaactctaaattaaagaaagcccgatcaaaccagagggagacttccacactcctcccctaccccgtggagattttttcttttttctgcagtgtcgaacgctccatgaagggctcaccaaatcgcctaacctcccggctatctctcccagacgtataataaaattaataacctaaagttatatataaataaggacaatttcgttgcatttttccccgcaggaggttgcccttttttcgttgcccaagaggaaaatgttcaggaaactactgtctcaaaccaatcgattttaaagatacagtatccttttctccgtgtaacgatttatgcggaaaataaatctccaagctcaagagcaaatgaaaagtttcacctctggttcctgcttgaggaacaaagaccaactgggcttgccgcctaggggaaagtggggccgtgggtatgggcgagggggcatctggccaggcgttgggcacaatggagcaggggcgagtgctttcagcattggagtcaccattcgggggccttcttagatccgtcaggccggacaaccgttcggattcggtggccgggaaataaataagccaattcctttggtgactaccccccgcggatttccagacccttagctaaatctagccacccagaaaggggaaaggggaaaaagaaacaatcaacccagatgcccccggggaggccagagcaggcatgcactggaattgataccttgatggtggtttcgggcaggttgagtgccgcggccagctcgcaccggcggggccgcgacacatagttctcccggtagaactccttctccaggcgcgcgatctgctcgcgggtgaacgccgtacggtagcgccgcacttgatccgcgccagagccggagccacccagcgccgcgctcccgccgctgcctccgctgcctccatgcaggcttccgaggcctgagcccgacgccgacgtcgtggtgccggcagccgagccgctctctgcgtaccctggcaaacaaacgaccaacagcgcatgagtggctgtaggaccaacagcccggcgctggcgctgcgcgcggatcggggaagccccgtcaggaaggagagtcgctgccggaattgatggggtctgtcatgcttacaaattgctgccgttaatggaatcaataaagtttggggagcccttcataagcaaataatagaaacggaattaggagatttcttttttaataattagaaattttcaaccaaggaggaaaagtggccgagggaaaatgcctacctctgggcgcagtttgggaagctctgggtttcccatggtctggagaccgcagggcagctttttatacggcctctaacctttatctgagtcttcggggtttcaaatattttaagagttccaacacagcagtagctcaaacccaagccaatagggggtgaaatatacttttcaactctttctcccgctgacctaaacagagacgccggcgaggcttcctccgacttacccagaagaatgccccctccagccctgagggcacaggggcaggggagttcagagtagttgcccagggtacctttcccaaaagcaactcggctgctgactaggggtctaccggctcgctcgggctcttagacacgagcgcagaaacattttctcggactcaggagcgagggcgggtgggcctggtgttccaggctccgcaggcctgagcctggcgggaaagctcaaggagcagaactggaaggcacggtcccagacatgcgtcccgcccccgcccgtgctagctcggtgtagcttgcctgtggagggtctgagaggggaaaaggcaccgggaaaggctggcgggggccgcggaggagcaaagaggatgggactggagagcgcggtgcggccggcgcggttacctttgccattgttttccttaagctgagcggcgccgaggcccccgggggagcgaagcgcggagcagcccacctccacgtcgctgctcatgtcggcctcagcggccgcctctgaataatggcccggcttcttgcggctctcggcggcggaggagatttcggaggagacggtgctttcgctgcccgtgtgctgcaggttgaacaaagtgtctatttcgaatttgcccttggcggggagttctcccagagcgctgtgcaggggggcagacggcaggcgcgggcttaggcgagccgggtgctgcgaattttccagggcctcgagcacagcattgccagccgagttggacaaattggagaatctcttgcccgccgtagggctgtgcagccctctctccatcagaatcatctcttttcttattctttccatcatctcagctttcttaaaaatgtcacagtggccctgctgtcccgtcctaatgataggctgcgcctagggctaattctcattcagccccagcgaacgcctctaaatattattatcgctttcggagggaggcggaaaaattgtgggatgccagagcgagggaatgactggtcaaaatgacccatacatccttccgatcccgagatgtcattcatcaaaaagtagcgcccgctcgtcattaaggtacgaatgacgctgttcgaataatcatttattgtaacaggtttataagcaaataaatacaccctcctgtcagtgggtaatgaaggcagcttcagagcagacaaatagatccaggtaggaggcgagaagagacaagtgaggaggaaggctccggtcctttgcccgctccgagccagttctgctcgcccgggggtttggcctcgggggtgaaattgacagtctgattaatagagcgcgccgcggcacatttcccccttcatttaggggcatcattacgctctcagtttgctaggttgccccttaggtcctaatcatgcagcgccttcttcatttttccttggacacagatacgtattaaataatagataatggtttgactttccagagtaggtcctcgggaaggtttggtttttttttttttttttttttttttttttaccatttacaagctgggggcataagtggggggagataagggggaggatgcaggaagagttgcgtaaggagaagaccttgcgcctctcctatctggattacttatctttcggatttcggaaccaaatatgtattttatttaacaaatag

SEQ ID NO: 3 - DNA, 5332 bp, Homo Sapiens
ctagtttcaaaccctgcacccgcactctccagacaggaagtccctctccctcgaccagggattgagggagaagagattcagaatgcatctccttgccctaggcctttcgggggggacatggccttagacagtcaccccgaaattgggctcaggtcctcacagtaagtcgagtgtccccccacatccccaaccccggccctttcactaaagtttaaaagattcttttgttcctcaggcttctcccgcttggttgcttccattattccccaactgcggaaacaccagccaccatatgtccgccggagaataagcgtgagtgtcgcggtggacagttgccgccaaaggtgtccagacggatggcattctcaaagtagggatcttagcatcctctccatacatcatcacccaagaatggtagaggaaagagtaggagtggggttacagataggagagaaaggaggttgaggccacaaaattggcatttctctaattatcaaccccctcctccaccatcctgccaccatttgttatggcaaagttctctttctgtgccccttccctaataaagaaatcctcagtcagcctccacctactccttttgatttgcaggaagccaaactgccagcagattgagctttctaagggatacctttgggatatgttggaattctgatttgttcaagatgatgacggtcatcagtacaaatcagaaacaatgccactcttcagggtgtcatttgtaagtgcaataacacggattcatttgcaaaacccagctaaactgcgtctggataagtgactagatccaaacgacaaatttcttccatcactcagctcctcccaagctctgcgggggcagcacagaagactgctttagggtgaaactaaggctcagctcaccatttgtgccagcttgagggaccctggaaatgttgactctgagaaaaagacaaaacaaaacaaaacaaaacaaaacccaatcacaaaacatatcctactgtctacaaagcaaacagaaacacaaagttgtttccaaaatcaccttttcagcaaataagtatgtgatattctgagcaggagcaggagggagagaaagactgccacttaaaaaaacatgaaagcattaagtaataatttaaaacacggctgtttagaaaaatatttatatttattgcagctgctcaattggcctcgttaaagtcggcaagcatttaaattgtgttacaatctcatttaaatcccgttccgttccagcaggctgaagagcttgaatagaccaatcacttcataatgatgatgaatgagaaattaattcagatacaagcaagacaatttaggccttcatctgtttaaatagccttccaatattattcgccatcgcgggtcacagattgaatcaattgtccaatcttgtgaaagtcatatccttgcgtcttcatcgagattatttatagcgcagtgagcgctgctgaaaggtatacgctgttaacagggacaattacttaaagggaagcgtttgtaaaatggaaaacaaatgccggggttggtaacaaatgggatcaaaagcagccattccaatctggctccccgagggaaaggagcgggcgtggccctgtaggattaggggcgcttctgacctccccaagacccaggtgaggccgagggtccccggcgcgccagcctgcgccgtggctgtggctgcggtggcgactcgggccgggcctcgctctcgccggcttcaggttcccgcctccctcgcgcaggcagcgggcgcgtgtggcccgggctgggcaagccgaggaacagcgagcccccggacgctgactgcaggacgtcccagtttgtgcccgggtctccgtccctccccgtacggggctcgtacccccgggcctgggtctgacccacagggcgctgaggcctttgtagctgaagtcggaaggcctcgttgcgagcgcggcacaggttgctggtagcttctggactctggaggcttggccttccttctaagccgatggcggggaaagaacctcgtttccacagcttccccgacccccgccgcttgccatttggggacgggaagcgcgcccgggtcgcttcacgtccctctgggccggagccctttccatggctggctcctctgggggcccttgggcctgtgagcagcgtctacttccctcagagaagaatcctttccttcccccatcgaagtgtccctttctgtatcctgaaataacccctcctgggtgaggccagttcccctctgtcgccctcctcccgcaggcgtccgggagcctcgtgaggaccccgtgcagttgagtccaggcgacaggtgcctccccaggtgtctacttgccctccctcaacctgtttagggaaagaccagaacgatgtgcgcggggaggtggttttgtttctcccgaaactggcgctcttgggtaaaaccgcgtgccgcgtctacgcgggctctgttagtgtgcgtgtcccagaagagtgggccttctaggcggcactctttggagaagtaagtgaggtgaactcagaacagagaagcgggaacgatcgtttgatgtgccgagccggaaaaagagaggagagggagaggctcccagcgagcgcggagacagaggagcccacgcggcacagcacgagccctactcttgcccgcgtagaggtgtgtgtgtgtgtgtgtgtgtgtgtgtgtgtgtgtgtgtgtgtgtgttttcctctgtatttctgtgtttgaaacaaaagcccaactaacggattcctggtgctctgaggactcactcccgggagcgactttgatgtattgctgtccaattagtgcctttaattggtgtcctcggagacaggcaggcccggagctgggacagagcctcctctcgcctctcctgcacactggaaaggtaaaatttataacacactgtggccaccccttgggagagcgaaagagagtgggaggcagggaagaaagggagagatgcagctgtttgcagaggacggagcctccagccccgggggtcgtggggaagggcccagaccaccgggttcgactcagttttctgtgtaagagggttcgggccggctgagtcgctgaggattatgaatttgctcgcagaaaggcctagggagctctcattgtctgtacaaacccaccccatgtggtctaccatctcgttaataatggctgtttgttaacaaggatgcggaggttaaataatccgggtggaagattaaacacgtctcatcaaggcgcttggaagccgcgcggtgcagagacctgcgctggagccgcctggctcactggagcctggagggagatgggagcacagtctgcaaggagccccggggtagaagaggaggcaaggtctagtctccctcttcagggtgtcctgctatgccaggacaggtctaactcttccacatgtcaaacagaaaatccacatagaagtcagccccaatgaggtgtggaggtcaaaccctcggagtagttggctggagggcagacatggagcatctggggtctgaaccaaaggcccccttttgaggaggggtggccatcccctgcctcccagtccttacatgtcatgcatctggcaatttgtgcctacatgggattagcattggattagaagacagaagatgtggtttctagtctgggttctgcccctaaatcactgtagaatttttattacattattctcccagcttcatttttctactgtgtaagagaaaggagatggggcttgatgtagatgatgtacagcatttcttcttttgtccagcttcccaccagagttagggaactgaacaccttataagatgctctgtctcccctaaaccttgcaggatgcagtcaaaaagaattttatttagcaaatatctgagggcctactctgcaccagtcatggtgcagtatgtattttttaactgagagcagaatatcagttcatattcccctgttattctcaaatataatgttttataacaaaagatgaaagagaaagaacttcaaagagaatagaataggatgggtatgtatgtacagggtagagaaactatggaggtaaaggtaaaggcattgacaaaagctgtgaagaacttgttgaactggcaaggaagtcagtggataaatactgcagaagtagctccttaacagagatactatgtaggagagtagagagaaggtcccctcctgaatcctggtgatttggcagagaacaaaagggtaagggttgcagaatttgactaggaggcccaagttgtatgcatctaatattgccaatttttggtttatatattctttcagtagttggaatttctctctctctctctctctctctttttctttttgagatggggtcttgctctgttgctcaggctggagtgcagtggccccatcaaggctcactgcagccttaaactcccaggctcaagtgatcctctcatctcagtctcccgagtagcaagggccacaggcatatgccaccatgcctggataatttttttttttggttgaggggtacagatggggtcttgctgtgttacccaggctggtctcaagcttctaggctcaatgaaccctcccaccctggtgtcccaaagtgttgagattacaggaatgagccactgtgcccggcctaggaagtttactctttagctaattttgaaacattactttctgaatccaccaatcaggaaactcggctgctaggctgggactcttcaagcttctgggtgatgggcatttagcctcaaggaaggcaatgatgcttaaatcactaaaccatgtctcagtttctgtgagtcaggaatctagtgagcttagctgtgtgtccctggctccaggctattccactggggttgtggtcttatctaaagactcagctgggtgaggatatgttccgggctcactcatgtggttgtttggcaggattcagttccttgctggtgggctatttggctgaaggcctcagttccttcttggtggttggccagaggtttctctgttccttaccatatgagcctctctatagggtagcttataaagtggcagctgtctttcctcagactgagtaagcaagagtgagagtggaggggggagaaagcacccaagacagaagctacactcttttggtcatctaatcttggaagtgactttccatcactatgccatattatatttgttagaagtgagtcactagatccagcccacactaaaggaaaggggattacagaaggcatcaaatccaggaggcagggatcactggggactgtcttagaggctgctgcccagaccccttttatataacagctctgaggcttatatggt

SEQ ID NO: 4 - DNA, 4215 bp, Homo Sapiens
ggtgcccgaccaagcgcagcccgcagtctgggcactgccaactgactccaactccttttatggtgagaggatggattcttcgttatttccccgcccaatctggtacccacccacccacccacctaccacgtccgctgggcgcacccaagtctaaccccggggcgcacgcgctagcgcagacaccgtatttcttctcctttctcggccaaccctaggtagaatcctaaaacaactgccctctcttccacgatctagatgttgcggcccgcggacaggaggttcaagaaatagtacactccgagcggcaggcagcgaggcggaaacggtcgccggtttcagtggtggccccactggaagccgagttcaggagcggctaagcggtcgccggggaaagcaccggggcttcccagggtcccctccgagttcccactccgcacctccgagggcgtgaaaaccacgggagccgccccaccccgcgcgcccagccccgccccagcccagacaccgccccccgccagtcttccctgcggcgcccagggaggacgcgctccgcccccttccaatccggccaatgggcgcccgggcagcgcgcggtttgcctccgcctccgccagggaaacttggaggaggagaaaagtttgtacagagggtggaaaggcgagagcggagctccaagcccggcagcccgagaggaagatgaacagccccaggccagagcctctggcagagtggaccccgagccgcccccaggtagccaggagcggcctcagcggcagccgcaaactccagtagccgcccgtgctgcccgtggctggggcggagggcagccagagctggggaccaaggctccgcgccacctgcgcgcacagcctcacacctgaacgctgtcctcccgcagacgagaccggcgggcactgcaaagctgggactcgtctttgaaggaaaaaaaatagcgagtaagaaatccagcaccattcttcactgacccatcccgctgcacctcttgtttcccaagtttttgaaagctggcaactctgacctcggtgtccaaaaatcgacagccactgagaccggctttgagaagccgaagatttggcagtttccagactgagcaggacaaggtgaaagcaggttggaggcgggtccaggacatctgagggctgaccctgggggctcgtgaggctgccaccgctgctgccgctacaggtgagatggcgttgggctgacgttggggtcaacgggtagagaacgcagggatgcggccctcgccgaagagagccaagaagggaagagcgcgctctccaaattgcttttgtaacttgttttcagtgagcattttattgattcagaatctatcgagaatagcactagcgagctacttttcccttgagatgggtcttattcatcttggcaatggagtgagttggattgtggggaggaagaggaatgggaaaatcagtttataaatattaatgtcagcaagagtgtgctgttggcaggacgtatcgcgagcctggagattttggtggccgcagttggtaagtggctacaatccagaaagtaggatcgagttgctccccttgtcttatcagtgtatcgtttctcgggcgcgggtctaacaccttacaagtggtaatttccgctcacggcagctttgtctctcttctaccatccccagacccagccttgcactccaaggctgcgcaccgccagccactatcatgtccactcccggggtcaattcgtccgcctccttgagccccgaccggctgaacagcccagtgaccatcccggcggtgatgttcatcttcggggtggtgggcaacctggtggccatcgtggtgctgtgcaagtcgcgcaaggagcagaaggagacgaccttctacacgctggtatgtgggctggctgtcaccgacctgttgggcactttgttggtgagcccggtgaccatcgccacgtacatgaagggccaatggcccgggggccagccgctgtgcgagtacagcaccttcattctgctcttcttcagcctgtccggcctcagcatcatctgcgccatgagtgtcgagcgctacctggccatcaaccatgcctatttctacagccactacgtggacaagcgattggcgggcctcacgctctttgcagtctatgcgtccaacgtgctcttttgcgcgctgcccaacatgggtctcggtagctcgcggctgcagtacccagacacctggtgcttcatcgactggaccaccaacgtgacggcgcacgccgcctactcctacatgtacgcgggcttcagctccttcctcattctcgccaccgtcctctgcaacgtgcttgtgtgcggcgcgctgctccgcatgcaccgccagttcatgcgccgcacctcgctgggcaccgagcagcaccacgcggccgcggccgcctcggttgcctcccggggccaccccgctgcctccccagccttgccgcgcctcagcgactttcggcgccgccggagcttccgccgcatcgcgggcgccgagatccagatggtcatcttactcattgccacctccctggtggtgctcatctgctccatcccgctcgtggtgagtgaccggggctggggccctactcggcctttttctcgcatccacctcccgcgtccattccccgctccctgctttccctctgagtccttggcagtgaacgtgtcgcctttaggtcggggctgggattcccacactgtttctcagagcaggcccaaccctctttgaagtcccaaccctaacgagatttagcaggtgctttgcccctacatcccccagtttatgttcccggaagcctgggtttctttctccaccgagacagcccttaccccttgctgcctgacactggccgagtcttccaagaaaaccccccgccccctctgttagacgtggaggggagcctgctgtagtgtgacttagcccattcctccgtactgtgaactgtgaactgcaaaacctgaaatgtcagggatggtgatctgttcgttgtaaaccatttttaaggaaagtggggtttttggtgttttgatgtatgcaaggtttcttgaatttcttcccccgtggattgcgtagaattttaaagctagaagagatatcaagaggtgttttagtctaactccctcacttcactgagggagtgaatgatacgcttaaaataatccagccgaacctacacagtcaagctaggctccctgctctttaccatggtgtgccctgggagggcagcttaaagcacacaaattctaattcatatacagggcagggtccagactcagtttctttcattctgtctagaccaggaaagcaaagtttctcagggtgactaattatggacaggctgatatacatagggtatgggatttgaattctcgacaactgtgcgaggtacagtaccattttagagaaaccgaggtttagagatggctgtctttgtttcttcaagccaaagctctacagcttgtaatggaccttaggccgtctgaggccagacccagctcatgtgttattacatcacgtctccctcgtagaacatttctcattttggcgtttgtaaagcgtgggttggagttttggtacacttcatttttagttcatcttttaagaattgcctttggattaacttttaaaatatgataaacagaaaggctcaaaccctacctagttttctactttgcctgtggctaaaatggaatgcaccagaagcagatgggcagaataatgcaatactttatctagagtttctcttgaaagcaactagttatgagttcttccatcttccaaaacactgcattcctggaaattctaaactaccaactcaaaaagagataactgctttttcttatgcttgttgggaacaagagaatataaaatgtaatgggctattattccttccttttccttattgatactgtccagggatctttggtgtaaaaatatatctttgataaaagtgactgtaaatggaaggaacttagagggggctcagagccagaatacagtaggttcttaccaatttgtataaacagaagtaaatataataggccataagagcctttaagccattccaggacccaatataatttacagagttaagtcacacttgagccacataaatatattttactgtctgtaatggcaacctagaataaagtgagattttggaagaaacaacactgctcctgatggg

SEQ ID NO: 5 - DNA, 5473 bp, Homo Sapiens
gtaatgttaattagcttcatcttaaagaaaaaccaaacaccagagcaaataatgactcctttgcggagaaggagttgtaagggttggggagaggtaattagtgtcataaaagcctcactacaaagaagtttagaatttctctgttctgctgtgcagcagagtgaaacacagtagcagaataattgtgcaccattatcatgataatctaatttgcttctttagaaaaagccactgtttgcagttaggatagtaggaaaacatctagaaaataactaaaatgtaaataaaagtatgaaacaacaataaagttcacttcttaagagaaaaaaagaagagcactcagcgaaaggagaatgaagtatatataaagcaagtaactcttaggtactttgttctcctggatgttacctgcttaaacttgacaacttttacaggcagtatgacagattttttaaaattcaaataaagcttgcttttgtattccactttcaataataaagcatattgattgactcacaaattaaagtttttaaaaccccattaaagtaaaaatactgcttcagagctttcattggtatgtttttgaaagcaagtgtcatagtcaatgtaaatcttcaaaaatttctctgctatttagtacaacagagggtggattttgtgccagggtggcatcctttgtgtaattcacatggcctgaggcttcttgcctttttttcccctagaagagttggaattaagatactaataatcataactgtaataattatcatcatgtttttaaggggttgctgagcctctggagatctcagtgcacagagcgaagcaggagaggcttaaaaaggaaggctctgctgctgatgctgtgatgaccaaggcagcctattattacttttcctcttcaacgtgactgctctgtttttttttttcctgatcctgttacaagatgtggggaagccccttaagaattgtgcatagttcgctacagatggtggtctctgtgcccagagaccgaaagagtatctgttacagcgatactttgtaacagctgcagatgtgcgggcctaaaactgctccatgtgttcaaaccaataataactatcattttattctattttattatctgagcggaaatacaatctgaaacatttaaatttgttccccctaaagctagaaggatatgtgtatgtgaatgtacacaatttgctcctttaaatgcccccaaagcctatttttgctattacatttgcctccacaaccaataaagaaaatctgtttcagtcctaacttcattgggtatggcacgtgctggagggcaggctttggaaatataaatactaatatatgtggtttgttttaaaatctaatgtatttagggtcagtttcgttgccttggttaaatgaatgaacaaagagtgaccaaaatgcgtttatttctccgctatttcacacacagtttgagatcgaccgctaacagcagactgtaaatttctgcacttaacagttactaattttctttatagtctgcacatctataaacctaattgggatatccgcttgacaaacctagaccctgcagagcagactttcaaggaaatccaactccagagaacaaaatactctttggaacttttaaggcatccagagataaaacgttttctgtgggatttttttttaagccttataaaagtaggcccattaggattaaaccacattaaagccagtgcgaggcaaggggggtgtggtttatagaaactctgggagaaagcccagcacagctttcttcttctgggaacatatgttaggatggaaaaaaaaaaaaggaggggagtgctataggactaagatctactttggaaaataagacctctagtaaagatatctctttccttctcatcttacaccagacactagaagcaccacctcccgagtgtgtcccccaagcctctttccaaccccaggctctctctgctccctgggccctcgacctcctggcagctgggtacctgcactcgggcctccgacaggcccagtcgctggctcagttcctctcgcatgaaggcgtcgggatagtgggtctcgtcaaaaagcctctccagctcattgagttgttccagggtgaaattggtccgacttcgcctctgcttgattttggtctggccttcgtcctccatccctttcgcatcctctttgcgatctttcagctccggggacactggagggggcaccccagcggggccacacgtgcatccacacgaacacacacacacacgcacacacacacggacgaaaacagcacagcaaatcctgttaccagatttgtcgcaaaaaagaatagagaatccttccccctcgtggaatcctggtccggcttctcaacccacccggaggaagaatatcccggagaagcgcaaaggtcaagtctgagcggccgcctggggcaaggtgggcagtcatccaccacctccttcacaaacgtacctcgactcaccgcctcactattcaccccccagtcaccggccttccccagcaaacaccaaatggtttccactcactttcgcactcacttgctccgcagcactcacagaaatcaaaggcgcagcgccaggcctctcacagagcaaagtctggacataagggcgcggcaaggccacccactggcctctcacaccggccattcccagaaggctggctcgttctcaggccagctctcaccaccgctggctctctgcctaccgcaaacttgctggtctaatttaggaacaattgggccgaaaggtatcagcgagagcaacagaccccggtgttgtgccgcacagggagccgcatccgcagacgcccctcgctgcccctgggctcgggccaaaccctgcataaggtcccctggacagccaggtaatctccgtcccgcctgcccgaccggggtcgcacgagcacaggcgcccacgccatgttggctgcccaaagggctcgccgcccaagccgggccagaaggcaggaggcggaaaaccagcctccggtggcgggcgaaagcaaccgctctttctgttctctcttcgccctccctcgtggaaacgcagactcgaccctaaacgcttaacccacagagatcaacaggttcaagcggaatattcgcgatcctcggtttctattggttgctcaaagccttttcatgcaaccagcagctcggatgtttaataaaatatgaatttttctgctctgggtttgcacacatccgttgccactttcctgtccttctcctccctttaaaaacaggagctcttctagtgtgagcatatacagccaccatatatatatccccctggaacctttatcctctgcgcccgaatcagagactccgggttttaagaagtcaaagctgagtttagatagtcgaggctgtttgcagttcttcccagcgcaggatccaggccagcatgggtgttaaaaatcatttccggaagagccggtctgcagagaaattaatacttgccctgagcttggaaatcaacaatcccaggaactgcgcccgccgggggttcagacctgaacctcgccgtcaggcgcgctggcgaacctgtagttcgggcctgtagttgtggactcatggccgggaggctgcactgggcaccttgacggtaactccaccactttacaaatttaggaagacctggtgctggtttggaggaagaagagtcgctagatctcggccctgccgggcattctagctacggtgatcttaaatattgccgtattttctagttctcagagttagttttgtggacatttgtcctttctttaggaaggaacattatagtaaacattatgggccaatttaatagcaaagtatttttactgatattgtattgaaatttaaatatgaaaacacacccttcaaattctgccaatgaggtgggaaggctttgtctattacatgtcatctacacagtggatgccactcaaagttttggggcttcgaggagatgtccaaatttcaagttgatccatagacttaataaaatctctatttttgtccccaaatttccaattactgatctaaacaggaacagaccgtgtcataaacaacttaattgcttgcttaaatatgtgattccacgcatgccacatattttcttaattggaaaaatatggcagtacaccagttactgcaggcaccaagtgccaaatcaattttattgttgaactcctttgaattggtatagaacgctctgccattgagataaagacgtttcctaacactgagctagcaccaaaggatttttgctctaagagaaccgagtactgggtgattgaaaacactaaaggaattgtgtaaatatagatccccacctcccccgccgccccccccccccgcccccaacacaccaagaaaccgaaacgcctcgcccgggagaagcagcgtagcctggacctcagctttcgttggcttccttctaccttgaaagagaatgggaagttttggcccctaagatccaaagattcaggggctctgcggagttcgaggggtcttggcggccccaaacacctaggcgaccggagggttaagctttccacctctgccccttctccctcccggcaaactctgcgctagaggctagctttagtcccgccgtctggttcagcaccccctcctgcagcccggccccgcgaacttccacgtccgcctgcgggccatccgggctgcgggcccatcctcccgctggtgaaaaatgcatttcggtggaatgggaacatctgggaagggcgcgcacaaaccccacacgcttccccccacgccacccccacaacacactaggaccccacccatgaccgagcataccaccggacccccacccttccactatcactctagctgacaaagctggggtccagggccctctccgtgtccctctcccctccccgctgggcctcggagtcctctcccgcccgagaggagtccggaaggcgggaaggggaaccgctgccgggggtcagtcaggtcgttaccctccgtcagtcgcgggctgcccggctccctgcttctctcggcggcgcccatgtccagctcccggacgggagagcgccctcctccagctcctccgcctgctcctcctcctcctacacctcctccgcctcctccgccgccgcctccgcctcctccgccgccgcctccgccggccgcccggactgccgggctgctgcggtcgtcgcggcccgcctcggtgcagccggtcggctccttggccccgcgcagcggcccgctctccagcacctcccggtacgtgatcgcctccttcttctccttcactttctggtcaaaagacttggagacgaacgccgtaagttcttccatcgccgccgcacgtcagcccggcgctcaacctctgccagcagagccccgctctttttttccttcttctttttttactgctccagcccccccaataataacacatcaatgggacaggaggtgggg

SEQ ID NO: 6 - DNA, 5328 bp, Homo Sapiens
ttgacaagagaaaaggtgttgagggcaggtcgcgctgtcttatttacagcccactgcttgctgtagagtctttgttaggactggaaagctaatttagtgctgatcaaaagcaccacagagttaaaggactggtaatgactgctaatttcatttcagcctcatgcatccccaactgctgtaattaaagacacgctatttaaatacaggtgaagggttttttttttttaagttgggttgggggggggtgggtgggtggattacaattttatttagatcttctactctacttgggtgttatgtagtcccaaattagattttattattattattatttagagccgctccttgtcatttatacctggctttgcagaatcggaagtgtgaaatgtgtcactcacataaaagcccctgtttaaagaaagggtgggacgggggagtgcagaggagtaactatttaggggtgatttaaatatttaggtctcctttttttctccttcaaattaatagaaaggccttcgatatagttaaaagtatttgaaactgggggcaaggttaacaggccaaagggatcagtgtcagctttttaagtacttctaaaaagatcatgtgaacagatggaaaaatatatttttaattaaataatttcccccacactatagctgcagtgttggctcagaaaccgtgtaatttctcatccgataggagtttctttatgagaacatcaaaggataaaaagctctgcattttcgtagttggttaaaattgataaccacccccccatgcgcgcgcgcgcacacacacatacacacatatacacacacacacaccaacacacacacacacacacacacacacacacacacacacacatatccccaaaaaagaatttagcctttaatctctttttatccacgaagactaaagctctgtactcgaccccgcgagcggctctcgccttccggggctggaacccgactcagatgtgaagcggcactgagccgctgcgcaggttcgtgcccagcgccccctgttggacacagtaggagctgcgcagcgccagtcccagaaatcgctggaatcctgctctggggttagagaaaactcttttattgccctccaaaaaagaaacgggatgcgaaaacaaatttttatatccttgaaaaataatataatattaactcaataaaaaactaaagaggcgatactacaattttaattcaataaaaaataaagactgtcctcctcacatcccagccatcccccacccggtttggttttgtaactcttttgaaaggttctgcgatggtaaaacaggtaaagaaaagtgacgaaaaacaaagcatttttctgtagccgtggagaatcaagcaaagtatacttcctccgttttgtccacatttcaaaaaattaaacggaagatgctgctgcttgctgttttgacgttgtcagcagcgtcttgaatgccctcagaggtcctgcaagtatcgtaactgagccttcgagtaaacgaaataacttgcttttatgtgtttatttccagagtataattaaaagaccagtctcttctttgagtgtttcccatcccctagaccaatcctggtcaaagtttttccttcccagatactggctaagaaacacatactggctaagaaacaggtgcctggtatcttttttctttcatcttagccgtaggatttcggggaaggtgtgccaatggtagggaaggttttctttgaaattcagcatttcgttgaccaggaatccaaattatcctagggaagggggagtatttttacacttccaaaaaactacctgtctacataataaagagctttgccttttttattattattatttcttcttcttctttttggtcagcaagtgagggcaaaagtagcctttgaattatttcagaaagagaaactgtaaaaatggcacatcctctgaatttaaaacaatagggaaatgtgggtttgcttaattgtttaaaatcaaatagaaataattactgtgctaaatgaacaagatgttttaagatttacatcttcagggttatggttattgattttaactttacccttaagaagtttagagatcgcgtttttaaagtttgcttattgacggaaatcggcttaatttttcataaaagaatggctttttaaaatattgaatactatggctatgcaaggtttatgatacctttatgtttattcttcccacctcccaaaattagcgaattcgagataacatttcaaggggaattgctatttagtgcgatgagagatgacttctccatctggttccagaattagatctcggcttaggttttttagtaagtaggttcagatgcaatggaaggagagaagaatcaagccttttgataaaatctctaccccgaattctatggaaaagacaggcaagcgggattccagccacagcacccccaccttttgctctaccaaaaggcttgtccccattacagaaataatatagtcggtgctagttttgtgaacccgcgccaaccgataaggtaagaaacggtgcgctgacagccgaggtccgaaggctgctcagtggttcccgcagcccgtggggtagggaggccaaagccagcaaaatgttggaggcgacgccagaaagagagtatatgcctgctattcggaagtgatgtcgaacgtgcaatagcagagtcctggagatttccaccccgttccgcacccagggatcccagcctgtggggtagcaggttgttgggtgaaggcaggagggagaagccgcacctggctgagggcgggtgggcgtgccgggagcgagtgcccaactttctagggcccatggagaaagcataacccctagttgaggaaagagagctaaacaagtgggtggcccaggcctgggaatgccacccagctctcccgacgcagtgttatttctgtggtcccagggggccccagcacctgcccgaatcccactccccaaggccgccagcaggaaggcagcccctccatctttgagggctgaggagggggcagcgagtgacttgattccttagtagcagggaaaaccgcagcggctggcaacgggccgcgtttctccgcggcggcaaagcgccctttaggggcggggcgggcatttttggtctcctgtcccagcgtccaggcctgagcccgcgcgggttggctgggcgccctgctttgtaagtaaccaatcttgctggattctgaggactatccaggcggatgggcccacttagcttaggcccactgagaccctgccaactcctcagacccttttccccttcatccctcacacctttcatgatgaacccaggaaagaacccgaactctgaaaaacagtacatgtggtttgaagtttgatagttatttgggtgtgagggacatgactctattaataaagactaagattcaaggctgagctctcatttattaaatttgctctttcactctgttttcaaactctggagatctttcagtttcgttgctccaaccctgacacagacaaaggcgccagggagaaagcccaggcgggcttgaagcagttgaggtatagactgatactcatctctccatcactcagacgggcagataagcactgccagactgggggtcctaatccagggcccagcggctacgtgggttgctgcggggtgttgaaaccacaagtacaacttgacaccattgagcccacggtgcttgtcaataatctgtgaattaggtgcagagattgtcactgtagatcataacagtttctgaaggactcattacagcctatcgtgtcaatgatcttcaaattaaggaggggaggtggggcgagacgaaaaaggagtggggagagccagcaaaaagggaagaagggtgggagggaagataaaagtcagagccccagctccgaaggagcctttaaagattatcaggccagcgatctgagaattccattgggatgggtttggaaacccaactccatctgagccaggactggaagaggggcgctgggggcaagcagaagtgggcccctgggaaggccgacttctcaggcatttcttttgaggccggaatagcttttgggagagggttctagatgtcaatgggaggccttgaggatgccagcccgcccaggatgggtgtacactttgatttagagcactttccagggcaagccgcagctgcagatctttgaaaaaagtggtaatagtttcgtttagggatgatggtgattgtaggatgactttttttttccaatggtttgctttaacttcttttcatgccacaggtgaaagctttcttccttttcctctgatagtattcctgtctgtccctcacatgttacgtagatctaatttctttccccaacttgtttttttgggtgccaaacacatcagccctctgagattttatcacttttgtggtttgtattgagtccaactgtaattctggaaagggaacttgtggataacacagtagcagtatgttccataagattccagaagaaagaagactaaattccatttatgcggtgtggcaggggccaggctaagggaaagaggttttccctgcttggtaaattgtccttgcagtgaaagggtagcccagccttcactggagtgtcatttaatactggctagagaaaggttaaggaaagtgtaggtttgtttttcccacaaaagttgtggtcacaactaaacgaagtaatcacagttggagaatttaaaacaactgttttttctctaaaatgagggtaataaccctagccactggaaaattgggattctaaggaaaaccttttcctttggtataattaattgcataagatagtgtggtcaatcagagacatatgtatttagactcaagcaatgatttacaggtgtaaaaggtccagtggctttttgggctacctggagttcctactgatcattttgccttttaaaaaattttcttctaattttaaaaataaaagtcatagatttaatgcaactgaaaaccactgatggcagctcttcaggttttcagtttatgtttttaaagggaatttatatttaaaataattaaatcatttaatggtcacactacattttctcctggacaacagctgtagtgcagggatagaatcttaacttacattaaaattgcttgataattcagaaatggaaatgaaattgtgaattaatttctccagaaaatatttgagctagaatataagaaggatgttcatatataatactgtaagtaacatgatgattattatatgcagcttgaaagacctacacaaatgattatatactacttctgttgctataatttaaagtaaggg

SEQ ID NO: 7 - DNA, 4324 bp, Homo Sapiens
gtcccccagtatcaccatcctaaaggcacttccacttcctctatcatcagggaaggagtgtgcagttctgatttagctcctcagtggagtaaagggaatttagaggaagggggatttctgcagaaattgtcagttacacaagtaagttcctcttggttccccgtttcatcaaaagtgaaaaactgttcacaggagtgcccatgtcccctgtttccctatgcatcactagagccaagaggggactccgccagcaaggcaccctctgctctgtcccgcagatcacagtccccgactttcaccccattgtttgtgcaatgtgcagaactggagcccaaagcagcgggctcaggatcactctccaggcccggcgggcccatagactccttccttggctgggaagaggggctttcgtgaaagcagagcttgacaagccccagtactgtcatggtcaagatcaccaacactactactgctgtgctcacaaatatgaagaccacggcagaggaggagtcgaaagcctgaggagtggcagaggaagtcgtagaattaaacttggaaatcacgctccctgatggggtgatagtggcctttgactcggcttgaagggacatttgaagggtagacatcgtgctctgtgatccccatcgaggaatctcaggaatagatgttactgaattgtcttgttcagggacaagtggtgtctctcccagcttctcgtcgaccctgattggccatgttctctgcggcacggggctggttgcagtggccggcgggcgcctggtgggcaccccggtccccccaagggtcggctgtccttccccactggtcacacaagagcggccgtccttccccagctcgaagcccgtagcacattcgcaggcaaagcctcccaagtcgtctaggcagttagggagctctgcgcatttgccagcacggaggtacctcccggggcagggacacaacacatcgcccgagagtttgtcccagcgagcgccgatttcgtccgcgatgcaagtaactgagatcgggagctgtccccggcagagcgcactcacctcggtcccaggtggactgaagtccagagcggcgctgtgcagctggaagggcgcgcgatagctcaagttagaggcggccccggggcgcggcgcaggacacaagacctcaaactggtacttgcacaggtagccgttggcgcgcaggtggcatcgcatctccttccagcctgcgggctcgaccccaccggtggcctggagtaccgcgcatctccgcgcggtgcaggagcgttggggctcctccacccactgcagcgtgtcgctttcgagaccgccggggtcggaggacagccaggagaaaccccgcaaaggctcgttctccagggtgcagtgggaacgcctgcgctccagtgcgacccagaacagcaggtctttggagccccctccgggccctgggcctgcccgcaggagcgcgagcacagcgcgcagctcggcgcccgcacgcacggtgctgagcgccccacctcgcaggatgcaggcctcctcggccgcctgccgcttcatggtagcgtggtgcaggctgtagcaggcccccgaggccgagcagccagcacggtcggcagtggggtgttcgccgccgcccggcccgggccagagcgcctgccagaggaggcacagggcgaacgccggcctcattctctgaggccccgcacgcagagctgctcccaacttggatctgtcccgctcgaggacgcagagctgtgtctggagcgcggtcaccgccctctacagctggcttccccaacccggttccccctcccttcccctccgccctcgctcccgacggaccccccaactgccaagaatccccccgcgggcccagcggccaacagtttcccttaggccgcgacaggaaatgtgtgcggagcgctgccaggcccggtgcagccctgagttattctggggtcaggaacacagctggcgccgggtacaggggacgcagtcgactagaaggtcaaacaccctgcttagagcaagaggagaaattcgccactgggatgaagtgtgtggtttttctccgttcagggagtttcatcaggaccgcagaacccataacacgtaagcgaacataggcaggaaggacttgagaaaggaactggcttatgattataagaccacgcccgtctattgtgtttctgtccggagctgtggagttagcgtcagaataattcgtagacggctccagtgtttggggggcctgtgcctgtgggggaaaaatatgttgtgaaacaacttagcaactgcttttgccaccagaggcagcactatttaaccgcatatctctctatgggtctttgcttctctattatgtcaagagatttcaggagtcctaactactaaagaatttggagttgtttgggtattttaaatgggaaattctgcttcttccatcagcacttgctttagaaatttatttttcacttccacgtgtttctctttgagttagaccatattgattcattacagaaaggaaatgtatttctaggactaaatgaaaaataatgaccatagatcttaacagttaggttgttagctttccttgccactgtattggttcaaaaattcttcaagtttataggttatacataaatgagttcgtggccttataaatattcgagaacaactgccctatgtgtgattttagccttgaactattttagtatcattttctcctatgattgagtggcagcatttataatagtaagttgtaaacatctcctttaaggaaaattagagttccttaagaaattaaaatgtttattccattataatgaatattgtatactgtcaaaaaatatcttgtaatttgaaagatgggtgagccaatttctttagaattccagtgggtgttttgttttaatataaacatttcaactcagtgggaagtggcaaggaattaaagatgaataaagaagtaaaggttaaaaactgtactgttatgaaaggatttcttgttagcaacttagacaattcagtatcagtttagaaaacgtacattctatcttggttcataatggccaaatacgttgccatcagaaatacatagagagtttcagctaagccctcttagagatgtctgatgcttttaaatatctttaatcagaatgaaagttgccattccatggataatgcatataagctcactttgttttactgcattcaggttgatgaggggtgggagggaaggtttcaggatcacatctgtatgcttccatcttatttttaccataactctcattcttctttcctcctggaaattccatgtatcttaacaaacaacagtaagcctatgagtcatcatcatacttaccttgcttttgctgagtatggagctttgcactaggatttctctcctgccctatttcccaatttaaagaacattccttagtccttccttcagatgtctgagaatcaccttaaacgtggctttgcgtttaaattaggtaacttagtgtcttataagaaagaaacatgaaaatccagaaatcaaattgaatggtttttaaaaaatacttagtcacttgggccagctctctatagaccattgcaatcttatgactgtgtttgtaaatgtgtccatgtagtgcaatatttttaataaaatctttttcaaacttaagtagtcaatggaaatttcttagatagctttaaaaatcgtttgggatgagatgaggtgtctacagtaagaaagaatgaatagctggaaagcttaagtaaatacatgatctcactccctgacattctgtctaggggagtgggattatagcagagaacacattggccataacgactatatgagagtactgaccatgaccatgaccatatcatggaatgacacaagagttagaaaaaattagctcaaagtaggacgtaaatagttttgtaattagtttgaaatagacagtttatctgaccaaattagaaatggaggaaagtttctattttttaataatatttattaagataataatatagaaccattttacccccactggattccaaatgcctaaaaatcttataataccaaatgtgaatctattggctcttttacatgttacagattagagcaaccactttggaaaaatttgacactttttttcactaaaattgaatatttgcaaactctagcacttccatgataaggtataaaactaagagaaatttttgcacatgtacaacagaagatatgtaaaaaatgtttatagtgacactattcatattaacaaaacgttgaatcaatcaaaatatccaaaaacagtataaaaataaac

SEQ ID NO: 8 - DNA, 5683 bp, Homo Sapiens
ataatgctaaatgtaaattctttgttttgttcaatgttcttattttatggttggcaaacaaaaacaacaaaacagcattgacaacaacaacagaaacaaccaactgaagctgcagcttttaatctttctaaagacaataggctaaagtgaggtcctcataataagatgctagtcaccaggaaggaagccagggaaaatctcctcccagggggtaattgatccctattggcctaacactgcatgtagcactgagttaggaggctccatggagaagtgtctgcttcttttcctctgctgtcagaacaaagttcacaaacaactttgttttccccacacctttggagttagctagttagggcccctatttatgtccaggggaccagacctggacatttgtaaaagaactgaatatagatggatagctaagaaaaaaacaaatgttaagattatcattatttatagcccaatgatttagtaatctaaaaaaatccaagaacaacaaaataatccctaagaaggacaagaattttaaaacatgcagtttagaaaaccaaatttctcaggcctagagctcaagtaaaagaaaatctgagataatgaagtctggaacactgggcctgcattctgctcctgactctgtgcccttgggtaagacattgaacttccccaccccagattcatcctacaccctaaggagggtgtaggattttgtagccttcctagtgatggcatactattaatcagaaccttaaccagctctattctcactatcccagtaaaatgatgttaaaaattagacctcgtgacatgagagaagaggggaaattaattacagattacaaagaaattgtgggatctaagtttagggtgaggtgttttattgaacctctagggttggtcatagcacctgccatatagcaggtattcaataaatgatgtgtaatgggtggttagactgatggaaaggcaggccttcccagtgacggtaaaggacctggggcaaaagagacctgtggttgagtcctgatccccacacattagcacactgactagacgaagttataagcttcaatttcttcctgtgtaaaatggagataatacctcatagggttatgaggattaaataagaaaatgcttagttcagtgcctaatacacaggaagcacaccgtaaatattagttattattattactaatactgtgatcatatcttccatccaaagacttctctgaggagcagggggcatccagagataaaaagcctgcaggtgggaaatctgttagccttctagggcgttaggtttctgtggaactctgcacctcttccctgtcctagttcttaagaacagaaactctccagggacctctggtgaggtagccgtgggaagatgaggtgcagaagtaagctgggacctgtgagcctcaatttcggcctcttctgcgctgagacccaagcggatcttgcttggcctgtatgcgttactgggggaaatggacgtgggcctgagcgcggcaggtgcgagggcgctgccccggggccgaccaccctgcggggacactgtagctgtcattccttcttctgcaggcgggtaggggaagcggtggccaaagtgggagtcgaccgctcagcacagtctgtctgagtgttgaccaggaaagtccaggctctttctaaatctcgccgccagacctggtgacgcattcgcatgtatttaaggcgtttgcacgcagaacgttatcacagaatgtagccacctttcttaacggtccgggaaaccagaggtctctccagctactcagggtagaggaatttctcctatctccatgtgacatcttctgatttagaagaactaatgttagatttctcttgggcctttccacctacagctatagtcttccctttgtttagctaaaattgaggcaggtaggaaaatattattgggggcataagcctattagtgtgtaaacgtatttttatgaagtgtgcctccagggagccattaaaaactgacctctcaaccacagaaatagatgagattttgagaacattgagaagctgccttttgcaaagtaaatttgcaatggtccttgacgaaggggggtcgggggcggggagaagtccagccgagagaggagctcattccacgctatatttttgcagttgaaaagctgcctaatcatcgctaaccgcttcccgcataagagttctgggaagacttcagaaacaaggcaaatgaagacttttcactgcctccttcgggctgtcgcttccggaagccgaagtcctagcacgcagagcagcaggagagggttactttcaggcaattccactgagcaaaataaatcacttaatggcataacgttctggcttaaaaaattggaatttatcagaggcaaaaatatccttcaagaaactatggacactccgcgccctattcatttccatggcagcagagtatctgcatcttgagccacctatacagattcatgcctcgtatcgctctcacctcctttctttttgaagtaaagccctttcccaagaaggcggccagaaagtggaccccaccgggggaaaaagaaaaatgaaacgcaaatcagcttggcactgcttgcgtcttccaaaacgcggtgggacaaggctattgagtctatagctaattctttcatgtatataaaatgtatacatatgtatatatttttatatacataaaagaattcatatatatgtatatagctatgtggagccctgaagcaattctccatgcttttgtctccctcaagttccccaggtggaggcagtcataagcattataagccgccttagtgaccaccagggacggaaaccgttaattatcacgtttcctttcatctccaggggccctttggcccgtgacacaagaggcttcggtattggcgctttcccagaactggcccagaggagccagttcagagtgtgaggtcgggtctgcattgaacgtacacaccgaggtctatcagactcccccgattttagcgaagggtgctgactgctgtgctgctagaggctagcaagctccctgtgcgcagctgatgagtttcagcaactcgccacctgggcgcttttctttaaattttgggagtaaactgggaaaataaaaaaatctccacgtccactggctctctccccttctccaacttcctctttcgactcgtttgtgggagttttctcctctttgctgggactataatgtgatgcgcaatcgtttgtgaatgaacaaaagtcaccggcaagcagggagacggggacagatcgctgacggcagattgagggtggcagcaaaggcccggcctccaaggataatggggagccgttttccctcacgcctggtctctatggcccccttcgtcttccaggtaaaatgaatgttccttcatccatcatccgcagagtaccctcaggcgtgcgtagaatctgctgatgaaacctattagcgccgactgggcagctttgtggagccacccgaggctctccattgtggcctttgtctgcagaatttaagcatttacataatgcattagcacggaactcagcacccggtggggacatcgcgtgccaagcctggcgcggccaacgcttcagcggctccctcacccggcagctccctaggaccaccctcgaggaggcattggagtcgggctgcaggcgcacgggcaaagaacttagcatctcatccaagtacttcgccttccttggccgtctccgggaggttatgcttaaaaacataaaaataaaaataaaaataaaaataaagggaggcggacaaagtttcggtgggtgaactgaagctgggtccatgtgaccctgaagccggagaaataaacttaacatgaatcttgctttcctggcgggcgttgggaccccgccgtttttcatgccaaccgttggaagcttcgtactcaacggccacaggtgcctaggagcgcagagaggcctcgggttcaaatcaccggcgcgcagggactggactcgcgggtagcgacccccccaacccccccccccccgccctacacacacaccctcgcgccggctgaaagcatggaggattcagggcatttgaaaaaagaggggctgggcgcggtggctcacgcctgtaatcccagcggtttgggaggtccagaagggcggatcacttgaggtcaggagttcgagaccagcctggccaacaccagcctggccaacatggtgagaccccgtgtctactaaaaatacaaaaattagccaggcgtggtgcctgtaatatcagctacttgggaggctgaggcacgagaatcgcttgaacctgggaggcggaggttgcagtgagcccagatcgcgccaccgccctcctgctctgggtgatagagcaaggcactgtctcaaaacaaaacaaaacaaaacgaaagattcggtcaggaaagaatctgcaggcattcgaggcgctcgcactttgcaaagtaaatgcaatctctttattaagccgaagtccctcatatctatccttttagaggaaggtggtccaactcagaaatctctcccaagaggactttccaccgaagactaccgcgaagtgccaggaactcgccccagtcccgacaggtgcaggacctttcgtgccgccacaccttgggactctacctccctaaataggccacttaaaagccagtagtgcaaccgggatcccgcggcgataaagaatcactgtgcagaaccctggagctgggagtcggcccgcccccctcccaaagaaaccgggatcccgcgtcctccccgccgctagcgcagcgcgccagcggcgcccaatcagtgagctttccgggtctgtgacggccttcggctccgccccctcgacggccataaaaagtcgcagcgaagcctgcacctccgagcaccgcgcgcggccctgcccccggcacggcccccaggtgcgctccttctccggctgcttgtagcactggtctcactgtccccgccgtcagccaccggttccttatccgtctcattccccattgtggcttggctgagccggtcgccaggcctcgctgtcctcctttgccttcctctctcctcagcggccgtactttgcgccgtacctcacctggcctgcaggtgagcagcagcgcagcacccctgcccggcgagcttaacttgcccagcccggcccctgccggagtggcaccggcacctctccaagacgccctcttccctgcaggatgaagaaccccatgctggaggtggtgtctttactactggagaagctgctcctcatctccaacttcacgctctttagttcgggcgccgcgggcgaagacaaagggaggaacagtttttatgaaaccagctctttccaccgaggcgacgtgctggaggtgccccggacccacctgacccactatggcatctacctaggagacaaccgtgttgcccacatgatgcccgacatcctgttggccctgacagacgacatggggcgcacgcagaaggtggtctccaacaagcgtctcatcctgggcgttattgtcaaagtggccagcatccgcgtggacacagtggaggacttcgcctacggagctaacatcctggtcaatcacctggacgagtccctccagaaaaaggcactgctcaacgaggaggtggcgcggagggctgaaaagctgctgggctttac

SEQ ID NO: 9 - DNA, 2347 bp, Homo Sapiens
ctgaggcttaagccagggaggtcgagactgcagtgagctctaattgcgccactgcactccagcctgggccacagagcaagaccctgctcaaaaaataacaagaaaggtggaggaaataggtagagatcagaggaaagtcatggccccctcctgaccatcctgagaccctcccaactccaccaattcctggagagtccctcacttgccttatttcacagattgggaaactgagtccaggggcactcagaccacctgaggccccagctggagatgaagagatggattcaaaccaccccttgtggagtatagttttgccccttccagagtggagaccgtgcctcagggcttcccccacccgcaccaaggttggccctctcaggcctcatctttcccacctgcaaaatgggcttttgtgagtatgaaggagggcttggcttgcagtgagcgctgtccacccgctggccagtgtgattagtcattgttgttgttccccagtggcctctgcctggcagctgctggaaaaacatcgagggagggagatacagggctggggaggtgaaaagctggacacagacgcccctagccccttgggatcaggaacagatggaggccgggtgccctgaagtggagcagggaggactgcctggaggagggacacttgagctagaatgtatagaattacagggcatctccggcagaggccacagcagaggcaaaagtccagaggaggtgctttggggaccaccaagatggacacagtgggtctgggtttctgtggggtgatgggctggggcctcgagcgccaggctaaagggcctggctttctccgagggcggtagggagccatggcaggtgtgtgagctggaggggtaccccagacaaaggtgaagtggtatttctccccttattgaagtcacaacctgacactccctctgaagttccccacatcccaccttccccttgccacatcttggcaagcccacctccttccctccgtctctaggcctgccaagaggccctgtgggccccttatggccccacccagctgccccagaagctcgtctgagataagttcccagggctgccccactttcaggtgccccacagactcgggggcgggtgaagcaggaaggatcgagtcacgagggccccagaaaacatgacgggaggaaccacagcacttccccacctcctcagcttccgccttctcagggagagagaccttcagcccgaggaggagggccgagcttccctccatgtggcaagagaccctaacgtcgctgaggatcatctaaagagggtgttgaaggatgcataggagttagccaggagacaacccatttgttaatttaacaaactcataggcatcactcatcaacaagaacaattttcatcattcaatcaggactttctaatgcctctgagggatcatttgaggatgtttaattattatttttatttgagacagggtctcactctgttacccaggctggagtgcagtgacacaatcatagctcactgcagcctcaacctcccagtttcaagctatccttctacctcagcctctgatatagctgagacacaggccaatgccaccatgatgcctggcttttcttttttttttttttttttttacttttgagacagagtcttgctcagtcacccaggctggagtgcagtggtgcgatttcagctcactataacctccgcctcctgagtttaagcaattctcctgcctcagcctcctgagtagctgggattacagacatgcaccaccacacccagctaatttttgtatttgtagtagagatggggtttcaccatgttgtccaggctggtctcaaatgcctgaccttaagtgatctgctggcctcggcctcccaaagggctgggattaccggcgtaagccaccgcccctcgaccatccagctttttttttttttttttcagtttttggtagaaatgtggtctcatgcctgtatcccagcactttgggaaggccgaggtgggcagatcacttgaggtcaggaattcgagactagcctgaccaacatggagaaaccccgtctctactaaaaatacaaaattagccgggcatggtggctcctgtctgtaatcccagctacttgggaggctgaggcaagagaatcacttgaacctggtaagcggggtttgcggtgagccaagatcgtgccattgcactccagcctgggcaacaagagtgaaattctgtctcaaaaaaataaaataaaataaaaatacaaaattagccaggcatggtggcacgcgcctgtaatcctagctactcaggaggctgaggcaggagaatcgcttgaacctggtaggc

SEQ ID NO: 10 - DNA, 6709 bp, Homo Sapiens
actcttaaactcctcaactcacagagggttggagagctggcaccatgagcttccagttcctacgggtgagaaaagaggtgtctgtgtggagggcaggtgcgaccccgggggctagcagagaggagaggctgcgggaggactcgctgcgaagggcgaggggtggcgctgggtgggacgggcgcctggggccgtgcagggtggctcctgggtgctgcccgggctgcctgtcgcccagtactggcgcaggaagacgggtccgcgcagcgtctggcaacagtggcctgctccacgcctggaggcgaccaagttctgagttaaaggcgccgggcttagccgggaagtgtatggcgacccagaacacggagcggagaaggcctcaggggacacgaggctaccgccttagtcctcgggcctgcgctccgagcggttagggtgcgtacggatgggctccgggatgttagtggagaggtgacaggagtctaccatcccacggccaagcgtgtgaggcctccggcgggcgggggtcccccccggggcagggcagggggagagtcaggcatgtctctaacgggctccctagtagaaccgctaggaaagtggccttcaaccctaggcacctttgtggctttcaggtagttgggcgactaaaaattcacttttgcctgctgtgaaatgggacaggtggttgtcaggttagagactgtgcccacgaagtctcgtttggcgggccgggactgacgtggacccgggccctcctcggaagcttgggaacctgtgagcccctcagctcctcgcctcactttgcctgtttgaaaaaaggagttgtttgagaggaagagttaaggctcaaaaggttctaaacgaagagcatgcggcctgacgcggagcgcaaagaagcgagcagtgaactgaatctggtgggactgagaccagaggcgtctgtatgcggcggccgcttcgcgccctattaaagcaatctgttatttacgataatcatttttgtaattattttggagtggctgtgacttgatgtctgtggtgccccagggcatgcccttactggacatagatacttcagggtgccctttgacgccagtgtcggtccagtgggtgccagtgccgcgaagggagggtggcgggcgtgaatgccccctcctcctgggtttgccgcaggccccggcctttccaccttgcttgatcctggcgggtctgccacttactgaggtccctaccggcgctcacgttgtcccgagaggcgggacaaacgtccggcgcgtggcgcggagtctgcgaaagcgctcgggggcctccatcttctgctcgggagtcccctccctggggcgggaagaggagtcgcagatctgcccgaatcttgctctacccgcctggccgccttcttccgtctggggtgggggcaggggtggcggatgactcaggcctggggccgggagccctgtttccaaaggcaccacctcgcgcctctttggaagtggcgcgctgttggggcgctcccgctgttgcagaggcctggtttgcggtttcataggggcgtgggtccagggcttccagggagtaagtgagtttaggctccctagggggcggtagaggggaacccccgacaaccttccatcctcttctccaggcggctgcgaggcctccggggttccagaggggtccccttctgccggtgccggctgtcttgagcgcggccacgcagtccgcgtcttcacgtgggcaaggggcggggacgttggagggaggctgtcttggatgctggagccttcggttcccggctctgctgagcagaaaagttgaagtcaaggaagggttgaggcttcctcacaagggcgcgcgcgtgcctgggtgccggcccagaagccgagaatgtgcgtattggggaagggtctcccgtgccgagaagacagaggatttgttctagctgccttccgtacagagggcgcggaggttgcgctccagttcgaacgcttacccattggaaagagggcagcgccggggtccagggaagctccttgggaatgaatggcctttgccaagcggttccggatcctctgggtcctttgggcccacggcacggtgctgcgcgagccctcagtgcccatcggctcccttcgcctcctgcgtagacgctcccaggcggggaggcatatcggttcctccgggcagctttggctagtgttgctgtgggaaaggagagccagggcctgggatgggggatgagcaccttcttgcccattccgggccccagcgtgcaggaggtaaacttgccagcacagacaagacagcttgttcaagctgcacctcaggccgggtcagagaataaaaccgagggctagaaggcccagaatgtcggacagcccagcggcacccgtcagggagtcccaggcgcccgaaagaggcgccgcacctctggcgagtctaggacccatcttcctggacctgtgctctggagtgcctgcgggcctgggtctaatttctgcttctggcaggtgtccccctcccccgccgctaataccaggagcgctgcttctgcggtaacttattttacccccagaagcctgttttgggaccgaagtgtcagggtcctgtgtgtctttttatgcactgttctccttagtgcaaagccctgcagatatgcttggccgaaaagtctcagtggtttcaacttccagattttgttcccgcgtccggtcggaaaatcacctgggatttggctgctgtctaaggccgggggaaagtttcccttggaggacgcctattattattattttcttttaggcccacctgggtctaaataaatgctaaagttcaaacgaacccgagaaggaacagcgaggcagtggatgccgccattccgtggatgggagagtcatgtctactgcaggtgcggacaccgtactgataggcattgattattgcaaaatcgtattcagtatcaaatagaaatagtcttgtcctctaatccccacagaatgtttaaatccagcccagggagccagttggggcgtcccaacaaatacgccctcgagaattagcgatgttccccttacaatgaaagtcaattgctgcataataactgggccaaagaatttcgttagtttaaattttaaaaattagtattgcactttgctttcaagtttgggtggcaagtaccgaaggggagagggaagcagcgtttgtgtggaaggaagtttcgttttctgtctaaacatgtgggacctgggtgtctacctctccagtcgagagctctctgcaggctctctcccaacttcctgcacctcctcaccctcaccttacccgtggcgctcgggttttattcctgcccggcgcttctttcccagggcgagtagaggcttctgagtgaccggcccgccagaggcagctgcagagccggcgttccgcagggcagggcagggccgggccgctgggctggtccagtgcgcgcgggttccccctggcctcagccagccgcgggagatgccacttcgggcgacagcggcgagacgccgctgtccgcaactcctgggcgggtaggaccgtctgctgcctctgcggcccttggggcagactccccaggagtcccttcctctctcctcccgcccgggggccgggaccgcgctgtgcccacggagggaactgggcgtctctggcgcactggggctccagctgcatgatcccagctcagaccttaagcctcagtggggtgtaggtgggatgggatgtgtttttaggagatgaggagaccccggttgttgagtcgctccccaaatgcgcagtttcttaactccaggtgacatccgtcttttggaggaacgagtgaaggccgtttaggcgaaagaggggtgggtttcagtatttggatcccttcccccagctctgccaatctcaggtgtgtttacggtggaggtgacagaaggaaggcgcgtcgggggacccaggcctcgcaggtcttcggctgtcaacgaggcaccgcccactgactccgcgcttcgtccctcacagcgtggggctcggcgctgcgccaggcccgggtgcggggcggagctaggctgggactggctgggggccgccccgcccggcgcctgggcctccgcgccggcccccggggaggagttatgataatttccttctcattaaggcgctcgggtcccccggctatcgccaggacacactgttcgggcgcggctttccccgtccgcggagcggtcttgacactcgcggcggcagcatctacgctcgcagagccgccgatgcgtgtccagtgacccggacagcaaggcccgcgcgcggcgggggcggcggcagacgcctggtcaccgtgaccccgattttggatttaccgcttgggggctggggggatcctggatttaactggcgactgttttgggggacgccggacgccatgttgtggaaaataaccgataatgtcaagtacgaagaggactgcgaggtgagctggggctccggggtgcagccccgccccgccgaggacagtccgggaggcaggggccactggaccgaggtcggggacgagggcataggagccctggcctctcggtgggacgggatccacttctccggacaccccttagtccatttctgcggggcccctttcctgtatagggccttttcctaaatagcctcccctcgggaacgaggcctggaaagagaatggcaaatcccacccacacagcttaccgggcgctttcctaagcggcaaacagccctgcttcccgttttctcggaaaagtgccccgtctgcaaccctcagacgtggcttttacgcacgaagtctctgtccaaaggggtcagatgaggctacctgctagcgacaccttggcggacactcctccaaggccggcttgtcacctgccccgctacctcctcggggaagcacgaaaacaaccgaagtttggctttcaaaagaagtgggggctggggagtggtggtgggggtgcccgaggccagatggggccgtaagagctcgcgagtgctccagcctgtcggacaggttgagctagagtttcggagagtgggagggaagaaggaggcggcgagcgggaagaggaagaagacgcaggcagcgctaggcgagctcaggggcgccgggagcgcggagctcgggctacggactcgcgggagttcactgcgcctccgggccctggagggctgcccctgcccgcaggcccgggcgcttccgccaggaggcgacagcgccatgttcctccaggttcccggcgccccgagacccctgggcagatggggacgcatcctttagaaactgagtcgggccgcccaggggcgagggaacgtgcgcgggcaaggctgcccaatttccagggttcttcatgccccctctgcgccccgacgtgcgagaacactgcccttggcagtgcagggcgcccccacttattactcccctcggctgggcccggccagcagggagggccgccctgtgcgcgcgctccctcttcacttcccagggcggcgcagggtggcgggccctgctttccgagcgccgcccgctcggaggtctttgtcccgagggcgtggaagggagggtcccgggggcgggggaggtgcgcatttcccgcgccgcgcactctatccgcgcctgccgcgctgccacctccagcagtccctgcgtcatgggcgggctccacgagatagctctgcaccgggcgtccggctccttcgccccgggctctggctccttcgccccgggctccggccacggacttttctggcccaagacccagggttcggacttggcgcctccaagcgcctcgggcttgggagcagcgcctagaccttcgccgccgggctttgagaactcgttcccccaggtctttcaccagactctcctccctccccgcactctttgcttacaacgaaatcctcggggcgcattgcccccgggtaccttccgaccctgggcaagccccgccgggcggggtgcggttggtcccccggggccctctgcgtagcccggcgatgccggccagttcgcagtagcggggtttcgcactaacggggtctcctgtttttttttttccctccaggatcgccacgacgggagcagcaatgggaatccgcgggtcccccacctctcctccgccgggcagcacctctacagccccgcgccacccctctcccacactggagtcgccgaatatcagccgccaccctactttccccctccctaccagcagctggcctactcccagtcggccgacccctactcgcatctgggggaagcgtacgccgccgccatcaaccccctgcaccagccggcgcccacaggcagccagcagcaggcctggcccggccgccagagccaggagggagcggggctgccctcgcaccacgggcgcccggccggcctactgccccacctctccgggctggaggcgggcgcggtgagcgcccgcagggatgcctaccgccgctccgacctgctgctgccccacgcacacgccctggatgccgcgggcctggccgagaacctggggctccacgacatgcctcaccagatggacgaggtgcaggtgagcggcgctgcggctcctgaccggacctgttcaccctacggccttctgcccccaccccgcactcctctaggctcccccgaacttaagggaattttgtcctctctcccccagaatgtcgacgaccagcacctgttgctgca

SEQ ID NO: 11 - DNA, 2296 bp, Homo Sapiens
gtcactgcaccctgccaacatttttcaaaagtaaaaaataaattaaaaaaaaagtctttagtggattgctgagtcccctctgacaggaggtaccaaatgtgcttttcctgaggacaggggaagagttcactattcagccatacctttgcatattttacaaaattcacttctaccaaggatgcctctccacaaaatgaggagtagcacaaagaacacctaagaaaccaggcctgacccagggcctctgatgctggggcaggttccccgcgtgctaatatcccaggggaccctgttgcagttctctgaataccggctgtgagctttccaacttcagctgagtcccagcatcctcctcacaccacttatcctccttgcctgtccctggcgcgtttagacaactggaatctttgctgacattttaaatgggctggctacttctccagcgtggaggcacctagcacaaggtgtgatagatcagtatttgttgatgagtaacaaagttattctggcaaattggacttttcccctgaaacgttttggcttttacatttttaatgatgggtcaagaaacagcccccaagaagaaggggcggagatagggggtaggaccctgcctgaagcttccaagctgactctgtttgcagtcacttaattcactagggagggctggatctgcctccctgtggtggactctccgcatctccagaaagtgcaggggtggagaattaactcagcccccctcctccccataagagccccgccaggtcagcctgcatgaggagggcacgtgcacacctccaaaaggactggtgcagccacttccctaagctcacagtcccagtgtgagctcagggcccagactcggggcctctggtgtttcaggcgtgagccaagtcccctgagcaagaggcctcatgataaatcagttggagcctgggggccatgaaagcattggttatggcagaaactaccagctcgtcaccgtttatgctgctttgcttaaaaatgacaccgcgtaagggattttgccaattcccaacctcgggagatcacccaccacctggctgtggtccgccgctgaacaggaaagcactccgagatgccaagagactaaaaggctcgtaactgttgtttagaaatgaaaatggccctaaattataaccagagatggaagcgcgtctcaggggagggcggggcgctgtgtaatcgagcctcccatgcgcaaggcggatacaaacggtttatggatgtgggcgaaggttctcagagcaaagaatgtccatttccatcagattaaaatacagtttgggaaaacaattacctgcctgagatcctgggaaagtaaaacttcctggtttctttgccaggaagaacgattgtaaaacaagggctgagaatctcccaaacaagattttagaattttatccaaacagctgcagttcacctttgaggagccccagactcacttgggtctgatggatgttgcaacaccaagtttgaggtctccccagcctggtgccaagagtgggccccaggggacaaacagagaacagttgctctcttaatcggagtagaaaacaaaactccctccccttcccacccccaacctccctgctttgttgtgaaattgtcactgcgcctttgaggagtgattaaaatcccagccatgaccaatttaaagggcaggttcccaggcagggaagggaaaggggttcaaggcaaaaaaaaaaaaaaaaagtcagttgaagtgagtttatggaggatttggggatcacaaaagtcatgggacttgagtcaattaaaattaatggaaaagcaccaacatgcaatttaaaaaataataataaaataaagcagtaaggatatttctggcttgctctctgcttccattcttgagcctgcttgggaatcttggagcagacttcctgaagcacagcatgagtgcccaatggctgttttaacctattttcctgcccttcacacacaaagattctgcaatggagagtgggaatgaatggtccacccacccctgaacatttcctgtgagttgggaatgcgctcagtaaggctgctggagtggagggaaaagaaaaggtgtctgagttctctagacatgggcagaaaaggagagaatttgagacaggctgagagaaagctgctccggttggcagcattgccagattctcagacacaccgtacattccagcccccgaaaaggccatcctgagtccctctagggcccctggggctctcatctcatcccaaatatttggaactgtctgtgcctgctataata

SEQ ID NO: 12 - DNA, 4247 bp, Homo Sapiens
ctccaaaaaaactaaaacacaaaacaacaataattactaaaaatcctacctccgctcctctaaataaaaaacctattccaaaaactccaatctaaaaacctaaaaacgaaaaacgcgcactacaattcccaaaaatccccgaactcaaaaacgatccccgccccccgccttctccgcgcgacgaaaccgaacttaccaataaaaacccgaaataaaacgaacaaaaacgaaacgaaacgaaactacgaaaaaataaccgacgaaccgcgccgcgaaccaatatctcaaaaaacgcgaaatccgaacaaccgcgcgctaaaaatctcgaaacgaacgccgcgaaacctctccgaaccataaataaacgactctacgacgcgacccgaacaaaaactcgacgaccctacaaaaaaattcaaaataccgacgccgaatcccctccaaccctcgtaacaatcgatacgctatataaaacgaaaaaaaacccgaaataaatttcgaaacgcgaaccaaaaaaaacgaacccgacccgcgacttcaacgctccccgaccgacgcgaaaaaaataaaactaaacgtccgcgcgaacttcgaaaaaaaaaaaaacaaaaaattttaacgaccaaaaacttcccgaacgtttatctcgaaactcttttcgccgtctcttacctaaaatataccgaacccgatacgactctatcgtcccacttcctactacgatttccacctcgaactaaactcaactaatttattataacaactatcgacaaccgcccctccgccccgtaacatcccgcaaatttcaaaaccgcgacgccgccgaacacaaactccgaatccaaaacgcgcgaccctttcctctacgaccgccgtttcctaaaaaaaactacgcgaatataaaaaacttactcaatacgctttataaaatccactattcctctttcgaccgcgaactacgccgataatccgaaaaacccgacttctcgccccctaccccttccttctcttcccttttctcttttcctctcctatctctccgcccacccgccgcaaccccacaaaaaaaaaatcgcttccctaattactctcctctcctatcccttatatatccccttatcttccctcgatctacaaaaaaaacgaaataacgactaaaaaacgtcaaaaaaaaaaaacaaaaacgtaaactacgaacttacaaacgatacccgacttcgcgctcgacgaaaactacgaaccaacccgaacccgcgctccgtccctccgcgatatctaaaaatcgcccgaactaaaatcgcgtcaccctccgcccaacgccgacgtaataaaacttacgcgatacaaaacccccgaaaacccaaaaaatcccaaaacgctacgaatccaatatccctttatttacaaaatcttaaaccaataaaaaatactccgcgaaccccaaaaaaaaacaacaaatacctcttaccccacccgaactcctctaataaaaacccacacgcacgataacgtcactacgcctacaaacaacgctaaaacacaaaaaaaataaaaaatcgaaactcgaaaacttcaccccgcaacaaaactcaaaacccaatccaaaccttaaaaacccgcctaaaacctaaaacttaatataacaaaaataaaaaaaacctccgataatctacttctacaattaaaaaacgtcaactaacacctctaaacctctaccccgtaaataaaataaaaacacacgaaaccatctaaaaaactctcactatccgtcaccaccaaatataacccaaactccgtaaaaaaaaacaatcccatcctaaaactaaaacttttaaaacatcccaaaacccgataaaaaaaacaaaaaaaataaaacttaaaaattaataacctcacattcaatatcccccgcacctccttccctttctataccctctaataactcttataacctcaactacccccaaaccctatctctctcgccctcccccaaactaaaatactaaaattaaactataacttaaactacacctataccctattaaaaaataaaaatcccaaacccatcgcgtttcttctcactactaactccaactcaacacttaacaaacccccctccccaaactactaaaacaaactcgcgtaaactcgacctaaccgccgctcccgaactaccgaataaaccgaccgtttcgccgcttcaaaaactatctttattttactccaactcaaacttaaaaaaacttaaaccaacaacctcaaccgaaaaaacgaaacgacgtctactaattattattaaaactactattaccattattataataattaacgcaatattcccaatcgataacttttcataaaaaaaaatatcacttccttcccatcacacccaaaataaataaaacgaacaacaaaaaaataaaaaaaaaaaaaaaaaaaaaaatatatacctccaacaaacccttaaacttaaaaactatataaccttatactaatcactacccctctctaaacaacaaaaatctataaatccattacgctcatcctacacccaaaaaactaatatttccgaaacacctactaaacaacgaaataccttaaaaaaaaaacaaaacaaacaaacctctaatcttctcactaaacctaactataatttataaaaaaaacctcctttctcttctcacttttttctactaaaaacattaaacacattaaatctaacacgcccatcttataaataaaaaaaaaaaaatacaaaaccaataaccaacttaataaaaaatacaaccatacaatactaaaaccccttaccccatctatcctcttaacccactttcatctacttccaacttaatatctaacaaaacaaaaacccactaacttccccgcatccacccactacctaaccccataactaccttctaatcctaactaaaccccgtaaaacatcttaaatttatcttcaataactctcaaccaccgcccgactaccttcaccttcctacctttacatacctacctttacttcgccaaattaattaaaccctaaccaaaactaaccccctactctctcaaataacaaataacaattttttaaataaaatctcaataaatatcaacaaatctttcctccttcctcaaaattataaaaataacaccccttattcaaaaataataaatcctctaaaccctccccgacccaaaccaaaaaaattaattcataaaatataaaaaccataccccttcccgaccctccccctctccccgctactacccaactctctaaccaaccccctcccatccctaaacctaaataccttaacaatcaacacaaacctactcttattaacaaaataacaaaaacgatatactaaaaaactacacatctacttaaaaaaaaaaaacaaatttacatcctctaaacacaaataaaaaacttaaaatctccctactcccattaaaaaaaaaaaaatctctaactctcaaaaatcaacgtctctcaaaaatcaaactaccctaattctaaatcccaactctaccataaataaactctataaccccaaacaaattactaaacctctctaaacctcaaacattatatctattatatctaaataactaaaaaaattcaacaatacaatattatataaaatacctaacccacaccaaccaaaacactaatttaaatcgataaaacatataacttaaaaacaaataaacctataaaaacatcctctactaaaaacaataacaaactaacatcttcaatactaaaattttaaaatctaaaaattaaacttaactcaaacaaaaactataaaattaaaaaaaaatcaaactcataacacaaaaaaaacctcaaacaatcctcctacccaacaccctaccgcaccccctctctacttaataaaaaactaaatcactaaaaacccaaactcatcttctaacgcaaccacctaacctacctcgaccctcttcccaacaataaaataaaaaaatcgcaaaaaaacttttataaaataaactactattatcaaaatttttctaacaccattttctaactacacaaaactcaaaaaacaaactaaaaataaacctccccaaaaaaacacaaaaactttttaaaaaaaaacttctaaaaactacaaaaaaaaacctaaattataaaaacacataatcctaaaaaaaaaaatacaatactataaaaatattatttctcctcaaaataatttctaaatttaaataca

SEQ ID NO: 13 - DNA, 3905 bp, Artificial Sequence
  chemically treated genomic DNA (Homo sapiens)
tttaaaaaagtagattcgaagatgtttaaagtaataatggtgttgttagaatggtgtttttttttttttttaggggatgattttgaaggatattataataatagatgtgtaaattttgaaatatatggttaaaatgaggtttattattttttagttattatttagatattttttagttatttgtttatgatagtttataaatgagaaagaagtttatttaaaatatttttatgaggattttaaggtaaataataggaatcgattatttattaatttggtttggtttcggtttattgaagaaagtttttttttgagtgtatttaaagtttttatggtttagttttgtttaatttgagtagtattttatttgttttttttttagacgtttcgatgttttgtattagatttaagagagagttaagttttttaataggttatgtacgtggttattaatatttagtatacgttatttttggttagtttttttttttttttttaagaattaaatattttttggtttgagttttttttttttatgttattataaagttgagttatttattattagggtttatatatgagtagttaaaatatacgggtttttatatttaggttaaggggtttttagtaggagaatatgaataattaggagtgaggttatgagatagaggaagaaaagtttataggaatgggaagatagttttttagatgagaggtgtgcggagtgattgttgtgaggaattgtttaataggaaagttagttaatttgaggacgtttttaggggaggaaaagggaaatttatatggttttttgttaatttttaaaaataaggtagatttttatttatttagggtgtttgttcgttatgaatataggaagattaaggaatgagtatggattgtttttattttatgttttcggataagaagaataataaaaaagtattgggtagttggaataattgtagaggttttaataatgatggagattttttggtgtatcgtggtataggggttttttttaaagggatttaattaattttaataggtattattttttgtgatttaagatgttttttttaggagtgtttgtattttttaatgtttagagaagttcgtattattgattcgggaatattgagttttttagtttttgtaaaattatttttaggtttatttttaagtatattttttatttcggggggttaaattttttggtttttagtgaatatcgtggttatatttgtggttatttattgattttttatttgtttagtttatttgataataggtaaatggggaaagaggttttaatattttttaaaaggggaagattgataattagttatttatcgtatagaattaggttaggttaattttttttaagaagaaaagtaatttggatattgtattttggggtttttttttattttggtattataggttttatgaggatgtagtttttttgtatttttttttttttttttaaattgttatttatttatttattttaattaggttaaagtattatatattgtagaagagaaagtaattttagttttttttaaacggtgttatttttatgatagttcgtaaattttggttttttatgggtttaggatttgcgcgtattcgttcggggatttgttggtggatttattttttatggcggagtagtaaggggattttttagaaaaagtaatgggcgaagtaattgaaagagcgacgtagaaagtaatagttagaaacggcggggacgcgagcggtttagataggaagggaggcggtggcgtagttttggtgcgtagcgcgtcgtagcgacggaatttttgtaaaagttgtttgttcgcgcgttattagcggcgcgtaggtttgtggttttttcgttttcgtaattttgttttaattgtcggtttatttttcgataaataggatgtttttatttgaggttgttagtattttaggttttttgaaagaaaagaagtagagcggttttattttagaggtaaggacggggtttgtgttaagaggttttttagagaagtgaaaattttgtaggtgtagtcgttgggagagtattaagaagggtagggtggaggggtagggggcgaagggagggggtgaagttcgtattttatttttatatgaaattgattttattattttatttttgtaagcgtttagaggtagagaggttaatatttcggggatagtttggaggcgggagatttaggtagggttttttaaatttttatgtgtatgaaaattaggttaattacggggtttttgagtaaatggggacgatgatttagtaggtttgggttgaggttttagattttgtatttttaataagtttttaggtggtagtgatgttgttagtttaaagattatattgtgaatagtaaggcgtcgtcgggatagtttgttttagagtaaaatttaatagatgtgtaaatatttaaattaagttgtatttatttttgaggttttggtttaattggagttattttgttaatggaaaatggaaaatgaaatttttttaggttttaaagggaaggaaagtttgaaatggttaaggtatttaaaaaattttagttgggagtggttttggggattcgggagagttgaagttaggttttgagttaagagatgggggaggaagggtgggatgtggtaaataaatataaatatatatatataaattttagtttaattataggtttttttttattaatgaaatatttgtattttgtaggtagaatttatacgtgtttatattttttagaagttgaatggttttgtgtaatggtatagaatttggagtttatatttgaatattttagatttaatgttattttagattggttttaggattttgtggtttatatttaaaaatgtatgtttttgagttatgtttaattagtagtagtatttgagaattgagagattagattaagaaatttatggtatatgaataaaatttttagatagtagttagaatatagaggtttttttagaggtagtgttagttgttagttgtaaaaataggttttgtttagttttgtttaggtttgaagttttttgaagattttatttagattttattaaaattagttaaagattttttgttatagaaaggtttttaaagtatggttgggattatagggttattaagatgtagatttttgggtttttttgttttatttattatggttttttagggtgggtgtcgggaatttgtattttaataaacgttttgaggatttttatgtattgttaagtttaggagtttttggtttgtaggtttaagtttaatttttttattgtagtatttaaagatttggttttaattttgttgtttataggcgagttttagtgatttttttattgttttttgagtatttttggagttatttggttgttttatttatttttttttttttgtttttttttagttttggaataaaatgatttttattttttttttcgaattttttttagattatggttttttatttagtaagtagttatttttttggtttgttattgttgtggtattaatgataggttattcgatttttattttgttgattgaatattttttatgtttaggttttgtttttttgattagatagtaagttttttgaagttattttatgttatataatttttatgtttaagattattttttaacgtagtgttatgtttatatggattatttagtaaatttatcgatggtttatttattattaatatgttttatagagtgttattaagtagggatattttttatgggtttaggattagaagaagttgggaagagaaatggggtagtggtgagagtgttatgagaatttggttatatagttattaaagatatagaggaagtgggaaaaagggagtgt

SEQ ID NO: 14 - DNA, 3905 bp, Artificial Sequence
  chemically treated genomic DNA (Homo sapiens)
atatttttttttttttattttttttgtgtttttgatgattgtataattagatttttatgatatttttattattattttatttttttttttagttttttttgattttagatttatagagagtgtttttgtttaataatattttgtaaaatatgttggtgatagataagttatcggtaaatttattgaatgatttatgtggatatgatattgcgttagaaagtagttttgaatataaagattatatagtatgaaatggttttagagaatttattgtttggttagggaggtaaagtttaagtatgagaaatatttagttaataaaatgagaatcgagtggtttattattaatattatagtagtggtagattaggaaagtaattgtttgttgagtgggaagttatgatttgaagagagttcggagaggaagatggaagttattttattttagggttggggaaagatagaggagaagaaatgaatgaggtagttaggtggttttaggagtgtttagagggtagtgaggaagttattgaggttcgtttgtgaatagtaaaattgaagttaggtttttgaatgttgtagtgagaaggttgaatttaaatttgtagattagggatttttaaatttggtagtatataagaatttttaaagcgtttgttaaaatgtaggttttcggtatttattttgagaaattatgatgagtgaggtagagaggtttaagaatttgtattttaatagttttgtagttttagttatattttaagaatttttttgtaataggaagtttttgattggttttgatgaagtttaaatgaaatttttaggaaattttaggtttaagtaaaattgagtagaatttatttttatagttgataattggtattgtttttggagggatttttatgttttagttgttgtttggagattttatttatatattatggattttttagtttagttttttagtttttagatattattattaattaaatatgatttagaaatatgtatttttaaatgtaggttataagattttaaagttagtttgagataatattggatttagaatatttaaatatgggttttaaattttgtattattatataaaattatttaatttttgaaaaatgtggatacgtgtgagttttatttgtaagatgtaaatgttttattgataggaaagaatttgtggttgggttggggtttgtgtgtgtgtgtttatatttatttgttatattttatttttttttttttattttttggtttagaatttaattttaattttttcgaatttttaaggttatttttaattaggattttttaaatattttaattattttaaattttttttttttttggaatttaaaggaattttattttttattttttattagtaaggtggttttagttaaattagggttttaggaataaatatagtttggtttaaatatttgtatatttattaggttttattttaaagtagattgtttcgacgacgttttgttatttatagtgtggtttttggattggtagtattattattatttgggaatttgttagaagtgtagaatttgaggttttagtttagatttgttgaattatcgtttttatttgtttaagagtttcgtgattggtttgatttttatgtatataaaagtttaaggagttttgtttaaatttttcgtttttaagttgttttcgaaatgttggtttttttgtttttggacgtttgtagagatggggtagtggaattagttttatgtgggggtagggtgcgggttttatttttttttttcgttttttgtttttttattttgttttttttgatgtttttttagcggttgtatttgtagagtttttatttttttgggaagttttttgatatagatttcgtttttgtttttagggtggggtcgttttatttttttttttttaaagagtttgggatgttgatagttttagatggaggtattttgtttgtcgaaaaataaatcggtagttaaagtagggttgcgagagcgagaaaattataggtttgcgcgtcgttgataacgcgcgggtaggtagtttttgtagaagtttcgtcgttgcggcgcgttgcgtattagagttgcgttatcgtttttttttttgtttgggtcgttcgcgttttcgtcgtttttggttgttgttttttgcgtcgtttttttagttatttcgtttattgttttttttaaaggatttttttgttgtttcgttatgagggatggatttattaataagttttcgggcggatgcgcgtagattttggatttataggaggttaaaatttacgagttgttatgaaaatgatatcgtttaagagaagttgaagttgtttttttttttgtagtatgtaatgttttgatttggttaaaataaataaataaataataatttaaaaagaaagaaagaaatatagaaagattatatttttatgaggtttgtaatgttaaaatgaaaagggattttaaagtgtaatatttagattgtttttttttttggagagagttgatttggtttgattttatgcggtgaataattaattattaattttttttttttgaggggtattaaagtttttttttttatttgtttgttattagataagttaggtagatgagaagttagtgggtaattataggtataattacgatatttattggaaattaaaagatttgatttttcgaggtaaagaatgtatttgaaaataaatttgaaaatagttttataggagttgaaaaatttagtgttttcgaattagtaatacgaatttttttgagtattaaaaagtataagtatttttaaaaaggatattttgagttatagaagatgatgtttgttggggttgattgagtttttttggaagagatttttgtgttacggtgtattagaaagtttttattattgttggggtttttgtagttgttttagttatttagtgtttttttattattttttttgttcgaaaatatagagtagaaatagtttatatttattttttaatttttttgtgtttataacgagtaagtattttagatgagtaagaatttattttatttttaagaattagtagagaattatatgagttttttttttttttttttagaaacgtttttaggttggttaatttttttattgagtaattttttatagtaattatttcgtatattttttatttgagaggttgtttttttatttttatgagtttttttttttttgttttatggttttatttttaattatttatgtttttttgttgaaggttttttgatttaaatatagagattcgtatattttggttatttatgtatagattttaataatgaataatttaattttatggtgatataaaggaggaaaatttaggttaaagaatgtttaatttttagggaagaaggagagagttggttagggatagcgtgtgttgggtgttaatagttacgtgtatagtttgttggggaatttggtttttttttgaatttggtgtagggtatcggaacgtttgggggaggagtagataggatgttgtttaggttgaatagggttggattatgagagttttgaatgtatttaagaaggaattttttttagtgggtcggggttaggttagattgatgaatgatcgatttttattatttattttgaggtttttatggagatattttaaatggattttttttttatttataaattgttataaataaatgattaaaagatgtttaagtggtgattagaaaataataaattttattttagttatatattttagaatttatatatttgttattgtagtgttttttaaagttattttttgggagggagagggagtattattttaatagtattattattattttaaatattttcggatttgtttttttgaa

SEQ ID NO: 15 - DNA, 5338 bp, Artificial Sequence
  chemically treated genomic DNA (Homo sapiens)
ggtaattttttttgttattattttttgtataaaatatgtaagatgtttttattttattagtattgaaattaaagattaaaagagagaaaggtgttggatcgaaaaggaggcggcgtaacggttattttttttagtatttcggttttgtttttttcggggaaggcggttatatttttattcgttttgtttttgaacgtagtaaataattttataaataattatcgttgtttacgttttttattcgttttttcggttttattagattttcgttttttcgtatttttcgggtagggtttttaataagtttaggttgaaagaacgtttgttattttttttattttcgttgaaagaaaaggaagaaaaatagtagtagcgagaaattttcggggcgatttttttttcgtttttaagtattagcgtatagtatttttttttgtttttgttgtggtttttcgttgtttcgggttacgtcgtttagttaagtaattcggatttgagagtgtatagttaggattagtttagggggcgaggggttggtttttgggaaattaagcgtttaggatagaggtggaaagtgggtttcgggagttagaaaagagagagaagggtagacggttgggtggtaaatataaaaatagaaataatttagggggatgttcgttaggtttttgcgtttgtttttttttttttaattcggagtaggtttttttcggtttttcgcgtttcggggcgttttttggcggtagcggtagtagcgggtaacgcgcggagggtttagggggcgtataggggattttcgggtatatttagagaggcgggcgcggttttttggcggtggcgacgtagttatttggtgagcggagtttcgtttttttggttcggcgggtttacggtcgttttattaagtatcgcggtcgagtagggtaggaagtcgttttcggaacgcggcgtcgtcgcgttgtagtcgaagttcgagtttttttcggtttcggcgttttcgtcgtcgtcgttattattattatcgtcgtcgttatcgttatttcgggaatttagggttgcggtagttgttgtcgcggttgtcgtcgtcgattgattgttgtggtaattgaggtacgagtagggtgtagagtcgtcgttggggggcgcgtcggtcgtcgtcgtcgaggaggtcgtagtcgttgcggttgtcgcggttgtcgcggtagaggtcgcgttgttgagtttcgcggcggtcgcgggagtttggtagagattagggtggcggaagttatatagtagtttcggtcgagagtaggggtgcgagagggcgcggaaggtgtttagtggtcggatggaagtagcgaagggcgacgaagtcgcggtcgtcgcgtttgaggttgtagtcgcggtcgtcgtcgtcgtgacgtttacgtgcgggtagtagtgtagcggtacgtgcgagtggaaggggtagggtaggttttcggtggcggtcgcgtgcgttattatgtaggtgtagaagttggggtcggttgggtgcggttaggatatggttaggcgttgtcgtttgttttttatgcgtcggttttggaattatatttgcggggagagacgcgtcgtagtttgggttagggagcgtttcgtgtttttagtttttgttttaggatttttgtttttttcggatttttgaatggtttggtttattttttttcgattaagtttaatttcgagtattttgtggttttttagttgggaaagtgtggacggtagtgtgtggatcgtcgtgggtatatcgtttttaacgaagagggttttttttttcgcgttcggttgttgttgttttttaggtttttatttttttattttttgttgtatttttttgttttaatttaattttttttttttttttcgttatttattagtgtcggtttcgttgagtattcgttttttaattttaggatttgtacggggattttgggtagtttttgaagagaggttgtcgtttagtttttttgagaggtcgtcgcgcgaagttttgagtttttcgaattgtaaggatttgtttttaggggtacgggttcgattttgatattgaagggatgattttgttggaatcgtttgttttaaatgagtgggtagagtaatgtttttataaacggggaaggggacgtttttattttttttaatattatttaataaagatattattcgttataattttaaattaaagaaagttcgattaaattagagggagatttttatattttttttttatttcgtggagatttttttttttttttgtagtgtcgaacgttttatgaagggtttattaaatcgtttaatttttcggttattttttttagacgtataataaaattaataatttaaagttatatataaataaggataatttcgttgtattttttttcgtaggaggttgtttttttttcgttgtttaagaggaaaatgtttaggaaattattgttttaaattaatcgattttaaagatatagtattttttttttcgtgtaacgatttatgcggaaaataaatttttaagtttaagagtaaatgaaaagttttatttttggtttttgtttgaggaataaagattaattgggtttgtcgtttaggggaaagtggggtcgtgggtatgggcgagggggtatttggttaggcgttgggtataatggagtaggggcgagtgtttttagtattggagttattattcgggggtttttttagattcgttaggtcggataatcgttcggattcggtggtcgggaaataaataagttaatttttttggtgattatttttcgcggatttttagatttttagttaaatttagttatttagaaaggggaaaggggaaaaagaaataattaatttagatgttttcggggaggttagagtaggtatgtattggaattgatattttgatggtggtttcgggtaggttgagtgtcgcggttagttcgtatcggcggggtcgcgatatatagttttttcggtagaattttttttttaggcgcgcgatttgttcgcgggtgaacgtcgtacggtagcgtcgtatttgattcgcgttagagtcggagttatttagcgtcgcgttttcgtcgttgttttcgttgtttttatgtaggttttcgaggtttgagttcgacgtcgacgtcgtggtgtcggtagtcgagtcgttttttgcgtattttggtaaataaacgattaatagcgtatgagtggttgtaggattaatagttcggcgttggcgttgcgcgcggatcggggaagtttcgttaggaaggagagtcgttgtcggaattgatggggtttgttatgtttataaattgttgtcgttaatggaattaataaagtttggggagttttttataagtaaataatagaaacggaattaggagattttttttttaataattagaaatttttaattaaggaggaaaagtggtcgagggaaaatgtttatttttgggcgtagtttgggaagttttgggttttttatggtttggagatcgtagggtagttttttatacggtttttaatttttatttgagttttcggggttttaaatattttaagagttttaatatagtagtagtttaaatttaagttaatagggggtgaaatatattttttaattttttttttcgttgatttaaatagagacgtcggcgaggtttttttcgatttatttagaagaatgttttttttagttttgagggtataggggtaggggagtttagagtagttgtttagggtattttttttaaaagtaattcggttgttgattaggggtttatcggttcgttcgggtttttagatacgagcgtagaaatattttttcggatttaggagcgagggcgggtgggtttggtgttttaggtttcgtaggtttgagtttggcgggaaagtttaaggagtagaattggaaggtacggttttagatatgcgtttcgttttcgttcgtgttagttcggtgtagtttgtttgtggagggtttgagaggggaaaaggtatcgggaaaggttggcgggggtcgcggaggagtaaagaggatgggattggagagcgcggtgcggtcggcgcggttatttttgttattgttttttttaagttgagcggcgtcgaggttttcgggggagcgaagcgcggagtagtttatttttacgtcgttgtttatgtcggttttagcggtcgtttttgaataatggttcggttttttgcggttttcggcggcggaggagatttcggaggagacggtgttttcgttgttcgtgtgttgtaggttgaataaagtgtttatttcgaatttgtttttggcggggagtttttttagagcgttgtgtaggggggtagacggtaggcgcgggtttaggcgagtcgggtgttgcgaattttttagggtttcgagtatagtattgttagtcgagttggataaattggagaattttttgttcgtcgtagggttgtgtagttttttttttattagaattatttttttttttattttttttattattttagtttttttaaaaatgttatagtggttttgttgtttcgttttaatgataggttgcgtttagggttaatttttatttagttttagcgaacgtttttaaatattattatcgttttcggagggaggcggaaaaattgtgggatgttagagcgagggaatgattggttaaaatgatttatatattttttcgatttcgagatgttatttattaaaaagtagcgttcgttcgttattaaggtacgaatgacgttgttcgaataattatttattgtaataggtttataagtaaataaatatatttttttgttagtgggtaatgaaggtagttttagagtagataaatagatttaggtaggaggcgagaagagataagtgaggaggaaggtttcggttttttgttcgtttcgagttagttttgttcgttcgggggtttggtttcgggggtgaaattgatagtttgattaatagagcgcgtcgcggtatatttttttttttatttaggggtattattacgtttttagtttgttaggttgttttttaggttttaattatgtagcgttttttttatttttttttggatatagatacgtattaaataatagataatggtttgattttttagagtaggttttcgggaaggtttggtttttttttttttttttttttttttttttattatttataagttgggggtataagtggggggagataagggggaggatgtaggaagagttgcgtaaggagaagattttgcgttttttttatttggattatttatttttcggatttcggaattaaatatgtattttatttaataaatag

SEQ ID NO: 16 - DNA, 5338 bp, Artificial Sequence
  chemically treated genomic DNA (Homo sapiens)
ttatttgttaaataaaatatatatttggtttcgaaattcgaaagataagtaatttagataggagaggcgtaaggttttttttttacgtaattttttttgtatttttttttttatttttttttatttatgtttttagtttgtaaatggtaaaaaaaaaaaaaaaaaaaaaaaaaaaaattaaattttttcgaggatttattttggaaagttaaattattatttattatttaatacgtatttgtgtttaaggaaaaatgaagaaggcgttgtatgattaggatttaaggggtaatttagtaaattgagagcgtaatgatgtttttaaatgaagggggaaatgtgtcgcggcgcgttttattaattagattgttaattttattttcgaggttaaattttcgggcgagtagaattggttcggagcgggtaaaggatcggagtttttttttttatttgttttttttcgttttttatttggatttatttgtttgttttgaagttgtttttattatttattgataggagggtgtatttatttgtttataaatttgttataataaatgattattcgaatagcgttattcgtattttaatgacgagcgggcgttattttttgatgaatgatatttcgggatcggaaggatgtatgggttattttgattagttattttttcgttttggtattttataattttttcgttttttttcgaaagcgataataatatttagaggcgttcgttggggttgaatgagaattagttttaggcgtagtttattattaggacgggatagtagggttattgtgatatttttaagaaagttgagatgatggaaagaataagaaaagagatgattttgatggagagagggttgtatagttttacggcgggtaagagattttttaatttgtttaattcggttggtaatgttgtgttcgaggttttggaaaattcgtagtattcggttcgtttaagttcgcgtttgtcgtttgtttttttgtatagcgttttgggagaatttttcgttaagggtaaattcgaaatagatattttgtttaatttgtagtatacgggtagcgaaagtatcgtttttttcgaaatttttttcgtcgtcgagagtcgtaagaagtcgggttattatttagaggcggtcgttgaggtcgatatgagtagcgacgtggaggtgggttgtttcgcgtttcgttttttcgggggtttcggcgtcgtttagtttaaggaaaataatggtaaaggtaatcgcgtcggtcgtatcgcgttttttagttttattttttttgttttttcgcggttttcgttagtttttttcggtgttttttttttttttagattttttataggtaagttatatcgagttagtacgggcgggggcgggacgtatgtttgggatcgtgttttttagttttgttttttgagttttttcgttaggtttaggtttgcggagtttggaatattaggtttattcgttttcgtttttgagttcgagaaaatgtttttgcgttcgtgtttaagagttcgagcgagtcggtagatttttagttagtagtcgagttgtttttgggaaaggtattttgggtaattattttgaatttttttgtttttgtgtttttagggttggagggggtatttttttgggtaagtcggaggaagtttcgtcggcgtttttgtttaggttagcgggagaaagagttgaaaagtatattttattttttattggtttgggtttgagttattgttgtgttggaatttttaaaatatttgaaatttcgaagatttagataaaggttagaggtcgtataaaaagttgttttgcggtttttagattatgggaaatttagagttttttaaattgcgtttagaggtaggtattttttttcggttattttttttttttggttgaaaatttttaattattaaaaaagaaattttttaatttcgtttttattatttgtttatgaagggttttttaaattttattgattttattaacggtagtaatttgtaagtatgatagattttattaatttcggtagcgatttttttttttgacggggttttttcgattcgcgcgtagcgttagcgtcgggttgttggttttatagttatttatgcgttgttggtcgtttgtttgttagggtacgtagagagcggttcggttgtcggtattacgacgtcggcgtcgggtttaggtttcggaagtttgtatggaggtagcggaggtagcggcgggagcgcggcgttgggtggtttcggttttggcgcggattaagtgcggcgttatcgtacggcgtttattcgcgagtagatcgcgcgtttggagaaggagttttatcgggagaattatgtgtcgcggtttcgtcggtgcgagttggtcgcggtatttaatttgttcgaaattattattaaggtattaattttagtgtatgtttgttttggttttttcgggggtatttgggttgattgtttttttttttttttttttttttttgggtggttagatttagttaagggtttggaaattcgcggggggtagttattaaaggaattggtttatttatttttcggttatcgaattcgaacggttgttcggtttgacggatttaagaaggttttcgaatggtgattttaatgttgaaagtattcgtttttgttttattgtgtttaacgtttggttagatgttttttcgtttatatttacggttttatttttttttaggcggtaagtttagttggtttttgttttttaagtaggaattagaggtgaaattttttatttgtttttgagtttggagatttatttttcgtataaatcgttatacggagaaaaggatattgtatttttaaaatcgattggtttgagatagtagttttttgaatattttttttttgggtaacgaaaaaagggtaattttttgcggggaaaaatgtaacgaaattgtttttatttatatataattttaggttattaattttattatacgtttgggagagatagtcgggaggttaggcgatttggtgagttttttatggagcgttcgatattgtagaaaaaagaaaaaatttttacggggtaggggaggagtgtggaagtttttttttggtttgatcgggttttttttaatttagagttgtgacgaatgatgtttttattagatagtgttgggaggggtggaaacgttttttttttcgtttatggagatattgttttatttatttatttaaggtaaacgattttaataaaattatttttttaatattaaaatcggattcgtgtttttaggggtaggtttttgtagttcggagggtttaagatttcgcgcggcgattttttagaaaagttgagcggtagtttttttttaaaggttgtttagaattttcgtataaattttgggattgagagacgggtgtttagcgagatcggtattggtgggtggcgggagggagaggaaaggttggattgggataaaaaagtgtagtaagaagtaagggaataaaagtttgaggagtagtagtagtcggacgcgggggagaggatttttttcgttgaggacggtgtgtttacggcggtttatatattgtcgtttatatttttttagttgggagattatagggtattcggggttgggtttggtcggagagaagtagattaagttatttagaggttcggaaggggtagaggttttgggataggagttgggaatacggggcgttttttaatttaggttgcggcgcgttttttttcgtaggtgtggttttagaatcggcgtatgaaggataagcggtagcgtttggttatgttttggtcgtatttagtcgattttagtttttatatttatatgatgacgtacgcggtcgttatcggaagtttgttttattttttttattcgtacgtgtcgttgtattattattcgtacgtgggcgttacggcggcggcggtcgcggttgtagttttaggcgcggcggtcgcggtttcgtcgtttttcgttatttttattcggttattggatatttttcgcgttttttcgtatttttattttcggtcggagttgttgtgtagttttcgttattttggtttttattaggttttcgcggtcgtcgcggggtttaatagcgcggtttttgtcgcggtagtcgcggtagtcgtagcggttgcggttttttcggcggcggcggtcggcgcgttttttagcggcggttttgtattttgttcgtgttttagttgttatagtagttagtcggcggcggtagtcgcggtagtagttgtcgtagttttgggttttcggggtggcggtggcggcggcggtggtggtggtggcggcggcggcgggggcgtcggggtcgggggaggttcggatttcggttgtagcgcggcggcgtcgcgtttcgagagcggttttttgttttattcggtcgcggtgtttagtaagacggtcgtgagttcgtcggattagagggacgaggtttcgtttattagataattacgtcgttatcgttagggggtcgcgttcgtttttttgagtgtgttcgggagttttttgtgcgttttttgagtttttcgcgcgttgttcgttgttgtcgttgtcgttagggggcgtttcggggcgcgggaggtcgaagggaatttgtttcgaattgggggagaaggagtaggcgtaaaagtttggcgggtatttttttaaattatttttatttttgtatttgttatttagtcgtttgttttttttttttttttttggttttcgggatttattttttatttttgttttgagcgtttggttttttaaagattaatttttcgttttttaagttagttttggttgtgtatttttaggttcgggttgtttggttgaacggcgtggttcgaagtaacggagaattataataaagatagagggggatgttgtgcgttggtgtttgggggcgggggaggagtcgtttcggaggtttttcgttgttgttgtttttttttttttttttttaacgagggtgggggaggtggtaaacgtttttttagtttgagtttattagggattttgttcgaagagtgcgggagaacggaggtttgataaggtcgggaggacggatggagagcgtgggtagcggtggttgtttgtgagattgtttattacgtttaggagtaaggcgggtagggatgtggtcgtttttttcgggaaggataaagtcgaggtgttggaaggggtggtcgttgcgtcgtttttttttcggtttaatattttttttttttttggtttttggttttagtgttgatggaatggaagtattttgtatattttatgtaaaaagtgatggtaaaagaggttgtt

SEQ ID NO: 17 - DNA, 5332 bp, Artificial Sequence
  chemically treated genomic DNA (Homo sapiens)
ttagttttaaattttgtattcgtattttttagataggaagtttttttttttcgattagggattgagggagaagagatttagaatgtatttttttgttttaggtttttcgggggggatatggttttagatagttatttcgaaattgggtttaggtttttatagtaagtcgagtgtttttttatatttttaatttcggtttttttattaaagtttaaaagatttttttgttttttaggtttttttcgtttggttgtttttattattttttaattgcggaaatattagttattatatgttcgtcggagaataagcgtgagtgtcgcggtggatagttgtcgttaaaggtgtttagacggatggtatttttaaagtagggattttagtattttttttatatattattatttaagaatggtagaggaaagagtaggagtggggttatagataggagagaaaggaggttgaggttataaaattggtatttttttaattattaatttttttttttattattttgttattatttgttatggtaaagttttttttttgtgttttttttttaataaagaaatttttagttagtttttatttattttttttgatttgtaggaagttaaattgttagtagattgagttttttaagggatatttttgggatatgttggaattttgatttgtttaagatgatgacggttattagtataaattagaaataatgttattttttagggtgttatttgtaagtgtaataatacggatttatttgtaaaatttagttaaattgcgtttggataagtgattagatttaaacgataaattttttttattatttagttttttttaagttttgcgggggtagtatagaagattgttttagggtgaaattaaggtttagtttattatttgtgttagtttgagggattttggaaatgttgattttgagaaaaagataaaataaaataaaataaaataaaatttaattataaaatatattttattgtttataaagtaaatagaaatataaagttgtttttaaaattatttttttagtaaataagtatgtgatattttgagtaggagtaggagggagagaaagattgttatttaaaaaaatatgaaagtattaagtaataatttaaaatacggttgtttagaaaaatatttatatttattgtagttgtttaattggtttcgttaaagtcggtaagtatttaaattgtgttataattttatttaaatttcgtttcgttttagtaggttgaagagtttgaatagattaattattttataatgatgatgaatgagaaattaatttagatataagtaagataatttaggtttttatttgtttaaatagttttttaatattattcgttatcgcgggttatagattgaattaattgtttaattttgtgaaagttatatttttgcgtttttatcgagattatttatagcgtagtgagcgttgttgaaaggtatacgttgttaatagggataattatttaaagggaagcgtttgtaaaatggaaaataaatgtcggggttggtaataaatgggattaaaagtagttattttaatttggtttttcgagggaaaggagcgggcgtggttttgtaggattaggggcgtttttgatttttttaagatttaggtgaggtcgagggttttcggcgcgttagtttgcgtcgtggttgtggttgcggtggcgattcgggtcgggtttcgttttcgtcggttttaggttttcgtttttttcgcgtaggtagcgggcgcgtgtggttcgggttgggtaagtcgaggaatagcgagttttcggacgttgattgtaggacgttttagtttgtgttcgggttttcgttttttttcgtacggggttcgtattttcgggtttgggtttgatttatagggcgttgaggtttttgtagttgaagtcggaaggtttcgttgcgagcgcggtataggttgttggtagtttttggattttggaggtttggttttttttttaagtcgatggcggggaaagaatttcgtttttatagttttttcgattttcgtcgtttgttatttggggacgggaagcgcgttcgggtcgttttacgtttttttgggtcggagttttttttatggttggtttttttgggggtttttgggtttgtgagtagcgtttattttttttagagaagaatttttttttttttttatcgaagtgtttttttttgtattttgaaataattttttttgggtgaggttagtttttttttgtcgtttttttttcgtaggcgttcgggagtttcgtgaggatttcgtgtagttgagtttaggcgataggtgtttttttaggtgtttatttgtttttttttaatttgtttagggaaagattagaacgatgtgcgcggggaggtggttttgtttttttcgaaattggcgtttttgggtaaaatcgcgtgtcgcgtttacgcgggttttgttagtgtgcgtgttttagaagagtgggttttttaggcggtattttttggagaagtaagtgaggtgaatttagaatagagaagcgggaacgatcgtttgatgtgtcgagtcggaaaaagagaggagagggagaggtttttagcgagcgcggagatagaggagtttacgcggtatagtacgagttttatttttgttcgcgtagaggtgtgtgtgtgtgtgtgtgtgtgtgtgtgtgtgtgtgtgtgtgtgtgtttttttttgtatttttgtgtttgaaataaaagtttaattaacggatttttggtgttttgaggatttattttcgggagcgattttgatgtattgttgtttaattagtgtttttaattggtgttttcggagataggtaggttcggagttgggatagagttttttttcgttttttttgtatattggaaaggtaaaatttataatatattgtggttattttttgggagagcgaaagagagtgggaggtagggaagaaagggagagatgtagttgtttgtagaggacggagtttttagtttcgggggtcgtggggaagggtttagattatcgggttcgatttagttttttgtgtaagagggttcgggtcggttgagtcgttgaggattatgaatttgttcgtagaaaggtttagggagtttttattgtttgtataaatttattttatgtggtttattatttcgttaataatggttgtttgttaataaggatgcggaggttaaataattcgggtggaagattaaatacgttttattaaggcgtttggaagtcgcgcggtgtagagatttgcgttggagtcgtttggtttattggagtttggagggagatgggagtatagtttgtaaggagtttcggggtagaagaggaggtaaggtttagtttttttttttagggtgttttgttatgttaggataggtttaatttttttatatgttaaatagaaaatttatatagaagttagttttaatgaggtgtggaggttaaattttcggagtagttggttggagggtagatatggagtatttggggtttgaattaaaggtttttttttgaggaggggtggttattttttgttttttagtttttatatgttatgtatttggtaatttgtgtttatatgggattagtattggattagaagatagaagatgtggtttttagtttgggttttgtttttaaattattgtagaatttttattatattatttttttagttttatttttttattgtgtaagagaaaggagatggggtttgatgtagatgatgtatagtatttttttttttgtttagttttttattagagttagggaattgaatattttataagatgttttgttttttttaaattttgtaggatgtagttaaaaagaattttatttagtaaatatttgagggtttattttgtattagttatggtgtagtatgtattttttaattgagagtagaatattagtttatatttttttgttatttttaaatataatgttttataataaaagatgaaagagaaagaattttaaagagaatagaataggatgggtatgtatgtatagggtagagaaattatggaggtaaaggtaaaggtattgataaaagttgtgaagaatttgttgaattggtaaggaagttagtggataaatattgtagaagtagttttttaatagagatattatgtaggagagtagagagaaggtttttttttgaattttggtgatttggtagagaataaaagggtaagggttgtagaatttgattaggaggtttaagttgtatgtatttaatattgttaatttttggtttatatatttttttagtagttggaatttttttttttttttttttttttttttttttttttgagatggggttttgttttgttgtttaggttggagtgtagtggttttattaaggtttattgtagttttaaatttttaggtttaagtgatttttttattttagtttttcgagtagtaagggttataggtatatgttattatgtttggataatttttttttttggttgaggggtatagatggggttttgttgtgttatttaggttggttttaagtttttaggtttaatgaatttttttattttggtgttttaaagtgttgagattataggaatgagttattgtgttcggtttaggaagtttattttttagttaattttgaaatattattttttgaatttattaattaggaaattcggttgttaggttgggattttttaagtttttgggtgatgggtatttagttttaaggaaggtaatgatgtttaaattattaaattatgttttagtttttgtgagttaggaatttagtgagtttagttgtgtgtttttggttttaggttattttattggggttgtggttttatttaaagatttagttgggtgaggatatgtttcgggtttatttatgtggttgtttggtaggatttagttttttgttggtgggttatttggttgaaggttttagtttttttttggtggttggttagaggtttttttgttttttattatatgagtttttttatagggtagtttataaagtggtagttgtttttttttagattgagtaagtaagagtgagagtggaggggggagaaagtatttaagatagaagttatatttttttggttatttaattttggaagtgattttttattattatgttatattatatttgttagaagtgagttattagatttagtttatattaaaggaaaggggattatagaaggtattaaatttaggaggtagggattattggggattgttttagaggttgttgtttagattttttttatataatagttttgaggtttatatggt

SEQ ID NO: 18 - DNA, 5332 bp, Artificial Sequence
  chemically treated genomic DNA (Homo sapiens)
attatataagttttagagttgttatataaaaggggtttgggtagtagtttttaagatagtttttagtgatttttgttttttggatttgatgttttttgtaatttttttttttttagtgtgggttggatttagtgatttatttttaataaatataatatggtatagtgatggaaagttatttttaagattagatgattaaaagagtgtagtttttgttttgggtgtttttttttttttttatttttatttttgtttatttagtttgaggaaagatagttgttattttataagttattttatagagaggtttatatggtaaggaatagagaaatttttggttaattattaagaaggaattgaggtttttagttaaatagtttattagtaaggaattgaattttgttaaataattatatgagtgagttcggaatatatttttatttagttgagtttttagataagattataattttagtggaatagtttggagttagggatatatagttaagtttattagatttttgatttatagaaattgagatatggtttagtgatttaagtattattgttttttttgaggttaaatgtttattatttagaagtttgaagagttttagtttagtagtcgagttttttgattggtggatttagaaagtaatgttttaaaattagttaaagagtaaattttttaggtcgggtatagtggtttatttttgtaattttaatattttgggatattagggtgggagggtttattgagtttagaagtttgagattagtttgggtaatatagtaagattttatttgtattttttaattaaaaaaaaaaattatttaggtatggtggtatatgtttgtggtttttgttattcgggagattgagatgagaggattatttgagtttgggagtttaaggttgtagtgagttttgatggggttattgtattttagtttgagtaatagagtaagattttattttaaaaagaaaaagagagagagagagagagagagaaattttaattattgaaagaatatataaattaaaaattggtaatattagatgtatataatttgggttttttagttaaattttgtaatttttatttttttgttttttgttaaattattaggatttaggaggggattttttttttatttttttatatagtatttttgttaaggagttatttttgtagtatttatttattgatttttttgttagtttaataagttttttatagtttttgttaatgtttttatttttatttttatagtttttttattttgtatatatatatttattttattttattttttttgaagtttttttttttttattttttgttataaaatattatatttgagaataataggggaatatgaattgatattttgtttttagttaaaaaatatatattgtattatgattggtgtagagtaggtttttagatatttgttaaataaaattttttttgattgtattttgtaaggtttaggggagatagagtattttataaggtgtttagttttttaattttggtgggaagttggataaaagaagaaatgttgtatattatttatattaagttttatttttttttttttatatagtagaaaaatgaagttgggagaataatgtaataaaaattttatagtgatttaggggtagaatttagattagaaattatattttttgttttttaatttaatgttaattttatgtaggtataaattgttagatgtatgatatgtaaggattgggaggtaggggatggttatttttttttaaaagggggtttttggtttagattttagatgttttatgtttgttttttagttaattatttcgagggtttgatttttatattttattggggttgatttttatgtggattttttgtttgatatgtggaagagttagatttgttttggtatagtaggatattttgaagagggagattagattttgtttttttttttatttcggggttttttgtagattgtgtttttatttttttttaggttttagtgagttaggcggttttagcgtaggtttttgtatcgcgcggtttttaagcgttttgatgagacgtgtttaattttttattcggattatttaattttcgtatttttgttaataaatagttattattaacgagatggtagattatatggggtgggtttgtatagataatgagagttttttaggtttttttgcgagtaaatttataatttttagcgatttagtcggttcgaatttttttatatagaaaattgagtcgaattcggtggtttgggtttttttttacgattttcggggttggaggtttcgttttttgtaaatagttgtattttttttttttttttttgttttttattttttttcgtttttttaaggggtggttatagtgtgttataaattttatttttttagtgtgtaggagaggcgagaggaggttttgttttagtttcgggtttgtttgttttcgaggatattaattaaaggtattaattggatagtaatatattaaagtcgttttcgggagtgagtttttagagtattaggaattcgttagttgggtttttgttttaaatatagaaatatagaggaaaatatatatatatatatatatatatatatatatatatatatatatatatttttacgcgggtaagagtagggttcgtgttgtgtcgcgtgggtttttttgttttcgcgttcgttgggagtttttttttttttttttttttttcggttcggtatattaaacgatcgttttcgtttttttgttttgagtttattttatttatttttttaaagagtgtcgtttagaaggtttatttttttgggatacgtatattaatagagttcgcgtagacgcggtacgcggttttatttaagagcgttagtttcgggagaaataaaattattttttcgcgtatatcgttttggtttttttttaaataggttgagggagggtaagtagatatttggggaggtatttgtcgtttggatttaattgtacggggtttttacgaggttttcggacgtttgcgggaggagggcgatagaggggaattggttttatttaggaggggttattttaggatatagaaagggatatttcgatgggggaaggaaaggatttttttttgagggaagtagacgttgtttataggtttaagggtttttagaggagttagttatggaaagggtttcggtttagagggacgtgaagcgattcgggcgcgtttttcgtttttaaatggtaagcggcgggggtcggggaagttgtggaaacgaggtttttttttcgttatcggtttagaaggaaggttaagtttttagagtttagaagttattagtaatttgtgtcgcgttcgtaacgaggtttttcgattttagttataaaggttttagcgttttgtgggttagatttaggttcgggggtacgagtttcgtacggggagggacggagattcgggtataaattgggacgttttgtagttagcgttcgggggttcgttgtttttcggtttgtttagttcgggttatacgcgttcgttgtttgcgcgagggaggcgggaatttgaagtcggcgagagcgaggttcggttcgagtcgttatcgtagttatagttacggcgtaggttggcgcgtcggggattttcggttttatttgggttttggggaggttagaagcgtttttaattttatagggttacgttcgtttttttttttcggggagttagattggaatggttgtttttgattttatttgttattaatttcggtatttgttttttattttataaacgtttttttttaagtaattgtttttgttaatagcgtatattttttagtagcgtttattgcgttataaataatttcgatgaagacgtaaggatatgatttttataagattggataattgatttaatttgtgattcgcgatggcgaataatattggaaggttatttaaatagatgaaggtttaaattgttttgtttgtatttgaattaattttttatttattattattatgaagtgattggtttatttaagttttttagtttgttggaacggaacgggatttaaatgagattgtaatataatttaaatgtttgtcgattttaacgaggttaattgagtagttgtaataaatataaatatttttttaaatagtcgtgttttaaattattatttaatgtttttatgtttttttaagtggtagttttttttttttttttgtttttgtttagaatattatatatttatttgttgaaaaggtgattttggaaataattttgtgtttttgtttgttttgtagatagtaggatatgttttgtgattgggttttgttttgttttgttttgttttgttttttttttagagttaatatttttagggttttttaagttggtataaatggtgagttgagttttagttttattttaaagtagttttttgtgttgttttcgtagagtttgggaggagttgagtgatggaagaaatttgtcgtttggatttagttatttatttagacgtagtttagttgggttttgtaaatgaattcgtgttattgtatttataaatgatattttgaagagtggtattgtttttgatttgtattgatgatcgttattattttgaataaattagaattttaatatattttaaaggtattttttagaaagtttaatttgttggtagtttggttttttgtaaattaaaaggagtaggtggaggttgattgaggatttttttattagggaaggggtatagaaagagaattttgttataataaatggtggtaggatggtggaggagggggttgataattagagaaatgttaattttgtggttttaatttttttttttttttatttgtaattttatttttatttttttttttattatttttgggtgatgatgtatggagaggatgttaagatttttattttgagaatgttattcgtttggatatttttggcggtaattgtttatcgcgatatttacgtttatttttcggcggatatatggtggttggtgttttcgtagttggggaataatggaagtaattaagcgggagaagtttgaggaataaaagaattttttaaattttagtgaaagggtcggggttggggatgtggggggatattcgatttattgtgaggatttgagtttaatttcggggtgattgtttaaggttatgtttttttcgaaaggtttagggtaaggagatgtattttgaatttttttttttttaatttttggtcgagggagagggattttttgtttggagagtgcgggtgtagggtttgaaattag

SEQ ID NO: 19 - DNA, 4215 bp, Artificial Sequence
  chemically treated genomic DNA (Homo sapiens)
ggtgttcgattaagcgtagttcgtagtttgggtattgttaattgattttaattttttttatggtgagaggatggatttttcgttattttttcgtttaatttggtatttatttatttatttatttattacgttcgttgggcgtatttaagtttaatttcggggcgtacgcgttagcgtagatatcgtatttttttttttttttcggttaattttaggtagaattttaaaataattgtttttttttttacgatttagatgttgcggttcgcggataggaggtttaagaaatagtatatttcgagcggtaggtagcgaggcggaaacggtcgtcggttttagtggtggttttattggaagtcgagtttaggagcggttaagcggtcgtcggggaaagtatcggggttttttagggtttttttcgagtttttatttcgtattttcgagggcgtgaaaattacgggagtcgttttatttcgcgcgtttagtttcgttttagtttagatatcgtttttcgttagttttttttgcggcgtttagggaggacgcgtttcgtttttttttaattcggttaatgggcgttcgggtagcgcgcggtttgttttcgttttcgttagggaaatttggaggaggagaaaagtttgtatagagggtggaaaggcgagagcggagttttaagttcggtagttcgagaggaagatgaatagttttaggttagagtttttggtagagtggatttcgagtcgtttttaggtagttaggagcggttttagcggtagtcgtaaattttagtagtcgttcgtgttgttcgtggttggggcggagggtagttagagttggggattaaggtttcgcgttatttgcgcgtatagttttatatttgaacgttgttttttcgtagacgagatcggcgggtattgtaaagttgggattcgtttttgaaggaaaaaaaatagcgagtaagaaatttagtattattttttattgatttatttcgttgtattttttgttttttaagtttttgaaagttggtaattttgatttcggtgtttaaaaatcgatagttattgagatcggttttgagaagtcgaagatttggtagtttttagattgagtaggataaggtgaaagtaggttggaggcgggtttaggatatttgagggttgattttgggggttcgtgaggttgttatcgttgttgtcgttataggtgagatggcgttgggttgacgttggggttaacgggtagagaacgtagggatgcggttttcgtcgaagagagttaagaagggaagagcgcgttttttaaattgtttttgtaatttgtttttagtgagtattttattgatttagaatttatcgagaatagtattagcgagttattttttttttgagatgggttttatttattttggtaatggagtgagttggattgtggggaggaagaggaatgggaaaattagtttataaatattaatgttagtaagagtgtgttgttggtaggacgtatcgcgagtttggagattttggtggtcgtagttggtaagtggttataatttagaaagtaggatcgagttgttttttttgttttattagtgtatcgtttttcgggcgcgggtttaatattttataagtggtaattttcgtttacggtagttttgttttttttttattatttttagatttagttttgtattttaaggttgcgtatcgttagttattattatgtttattttcggggttaattcgttcgtttttttgagtttcgatcggttgaatagtttagtgattatttcggcggtgatgtttattttcggggtggtgggtaatttggtggttatcgtggtgttgtgtaagtcgcgtaaggagtagaaggagacgattttttatacgttggtatgtgggttggttgttatcgatttgttgggtattttgttggtgagttcggtgattatcgttacgtatatgaagggttaatggttcgggggttagtcgttgtgcgagtatagtatttttattttgtttttttttagtttgttcggttttagtattatttgcgttatgagtgtcgagcgttatttggttattaattatgtttatttttatagttattacgtggataagcgattggcgggttttacgttttttgtagtttatgcgtttaacgtgtttttttgcgcgttgtttaatatgggtttcggtagttcgcggttgtagtatttagatatttggtgttttatcgattggattattaacgtgacggcgtacgtcgtttatttttatatgtacgcgggttttagttttttttttattttcgttatcgttttttgtaacgtgtttgtgtgcggcgcgttgtttcgtatgtatcgttagtttatgcgtcgtatttcgttgggtatcgagtagtattacgcggtcgcggtcgtttcggttgtttttcggggttatttcgttgtttttttagttttgtcgcgttttagcgattttcggcgtcgtcggagttttcgtcgtatcgcgggcgtcgagatttagatggttattttatttattgttatttttttggtggtgtttatttgttttatttcgttcgtggtgagtgatcggggttggggttttattcggtttttttttcgtatttatttttcgcgtttatttttcgttttttgttttttttttgagtttttggtagtgaacgtgtcgtttttaggtcggggttgggatttttatattgttttttagagtaggtttaattttttttgaagttttaattttaacgagatttagtaggtgttttgtttttatattttttagtttatgttttcggaagtttgggtttttttttttatcgagatagtttttattttttgttgtttgatattggtcgagttttttaagaaaatttttcgttttttttgttagacgtggaggggagtttgttgtagtgtgatttagtttattttttcgtattgtgaattgtgaattgtaaaatttgaaatgttagggatggtgatttgttcgttgtaaattatttttaaggaaagtggggtttttggtgttttgatgtatgtaaggttttttgaattttttttttcgtggattgcgtagaattttaaagttagaagagatattaagaggtgttttagtttaatttttttattttattgagggagtgaatgatacgtttaaaataatttagtcgaatttatatagttaagttaggttttttgttttttattatggtgtgttttgggagggtagtttaaagtatataaattttaatttatatatagggtagggtttagatttagttttttttattttgtttagattaggaaagtaaagttttttagggtgattaattatggataggttgatatatatagggtatgggatttgaattttcgataattgtgcgaggtatagtattattttagagaaatcgaggtttagagatggttgtttttgtttttttaagttaaagttttatagtttgtaatggattttaggtcgtttgaggttagatttagtttatgtgttattatattacgtttttttcgtagaatattttttattttggcgtttgtaaagcgtgggttggagttttggtatattttatttttagtttattttttaagaattgtttttggattaatttttaaaatatgataaatagaaaggtttaaattttatttagttttttattttgtttgtggttaaaatggaatgtattagaagtagatgggtagaataatgtaatattttatttagagttttttttgaaagtaattagttatgagtttttttattttttaaaatattgtatttttggaaattttaaattattaatttaaaaagagataattgtttttttttatgtttgttgggaataagagaatataaaatgtaatgggttattattttttttttttttttattgatattgtttagggatttttggtgtaaaaatatatttttgataaaagtgattgtaaatggaaggaatttagagggggtttagagttagaatatagtaggtttttattaatttgtataaatagaagtaaatataataggttataagagtttttaagttattttaggatttaatataatttatagagttaagttatatttgagttatataaatatattttattgtttgtaatggtaatttagaataaagtgagattttggaagaaataatattgtttttgatggg

SEQ ID NO: 20 - DNA, 4215 bp, Artificial Sequence
  chemically treated genomic DNA (Homo sapiens)
tttattaggagtagtgttgttttttttaaaattttattttattttaggttgttattatagatagtaaaatatatttatgtggtttaagtgtgatttaattttgtaaattatattgggttttggaatggtttaaaggtttttatggtttattatatttatttttgtttatataaattggtaagaatttattgtattttggttttgagttttttttaagttttttttatttatagttatttttattaaagatatatttttatattaaagatttttggatagtattaataaggaaaaggaaggaataatagtttattatattttatatttttttgtttttaataagtataagaaaaagtagttatttttttttgagttggtagtttagaatttttaggaatgtagtgttttggaagatggaagaatttataattagttgtttttaagagaaattttagataaagtattgtattattttgtttatttgtttttggtgtattttattttagttataggtaaagtagaaaattaggtagggtttgagtttttttgtttattatattttaaaagttaatttaaaggtaatttttaaaagatgaattaaaaatgaagtgtattaaaattttaatttacgttttataaacgttaaaatgagaaatgttttacgagggagacgtgatgtaataatatatgagttgggtttggttttagacggtttaaggtttattataagttgtagagttttggtttgaagaaataaagatagttatttttaaatttcggtttttttaaaatggtattgtatttcgtatagttgtcgagaatttaaattttatattttatgtatattagtttgtttataattagttattttgagaaattttgtttttttggtttagatagaatgaaagaaattgagtttggattttgttttgtatatgaattagaatttgtgtgttttaagttgtttttttagggtatattatggtaaagagtagggagtttagtttgattgtgtaggttcggttggattattttaagcgtattatttatttttttagtgaagtgagggagttagattaaaatattttttgatattttttttagttttaaaattttacgtaatttacgggggaagaaatttaagaaattttgtatatattaaaatattaaaaattttattttttttaaaaatggtttataacgaatagattattatttttgatattttaggttttgtagtttatagtttatagtacggaggaatgggttaagttatattatagtaggtttttttttacgtttaatagagggggcggggggtttttttggaagattcggttagtgttaggtagtaaggggtaagggttgtttcggtggagaaagaaatttaggttttcgggaatataaattgggggatgtaggggtaaagtatttgttaaatttcgttagggttgggattttaaagagggttgggtttgttttgagaaatagtgtgggaattttagtttcgatttaaaggcgatacgtttattgttaaggatttagagggaaagtagggagcggggaatggacgcgggaggtggatgcgagaaaaaggtcgagtagggttttagtttcggttatttattacgagcgggatggagtagatgagtattattagggaggtggtaatgagtaagatgattatttggatttcggcgttcgcgatgcggcggaagtttcggcggcgtcgaaagtcgttgaggcgcggtaaggttggggaggtagcggggtggtttcgggaggtaatcgaggcggtcgcggtcgcgtggtgttgttcggtgtttagcgaggtgcggcgtatgaattggcggtgtatgcggagtagcgcgtcgtatataagtacgttgtagaggacggtggcgagaatgaggaaggagttgaagttcgcgtatatgtaggagtaggcggcgtgcgtcgttacgttggtggtttagtcgatgaagtattaggtgtttgggtattgtagtcgcgagttatcgagatttatgttgggtagcgcgtaaaagagtacgttggacgtatagattgtaaagagcgtgaggttcgttaatcgtttgtttacgtagtggttgtagaaataggtatggttgatggttaggtagcgttcgatatttatggcgtagatgatgttgaggtcggataggttgaagaagagtagaatgaaggtgttgtattcgtatagcggttggttttcgggttattggttttttatgtacgtggcgatggttatcgggtttattaataaagtgtttaataggtcggtgatagttagtttatatattagcgtgtagaaggtcgtttttttttgttttttgcgcgatttgtatagtattacgatggttattaggttgtttattatttcgaagatgaatattatcgtcgggatggttattgggttgtttagtcggtcggggtttaaggaggcggacgaattgatttcgggagtggatatgatagtggttggcggtgcgtagttttggagtgtaaggttgggtttggggatggtagaagagagataaagttgtcgtgagcggaaattattatttgtaaggtgttagattcgcgttcgagaaacgatatattgataagataaggggagtaattcgattttattttttggattgtagttatttattaattgcggttattaaaatttttaggttcgcgatacgttttgttaatagtatatttttgttgatattaatatttataaattgatttttttatttttttttttttttataatttaatttattttattgttaagatgaataagatttattttaagggaaaagtagttcgttagtgttattttcgatagattttgaattaataaaatgtttattgaaaataagttataaaagtaatttggagagcgcgtttttttttttttggtttttttcggcgagggtcgtatttttgcgttttttattcgttgattttaacgttagtttaacgttattttatttgtagcggtagtagcggtggtagttttacgagtttttagggttagtttttagatgttttggattcgtttttaatttgtttttattttgttttgtttagtttggaaattgttaaattttcggttttttaaagtcggttttagtggttgtcgatttttggatatcgaggttagagttgttagtttttaaaaatttgggaaataagaggtgtagcgggatgggttagtgaagaatggtgttggattttttattcgttatttttttttttttaaagacgagttttagttttgtagtgttcgtcggtttcgtttgcgggaggatagcgtttaggtgtgaggttgtgcgcgtaggtggcgcggagttttggtttttagttttggttgtttttcgttttagttacgggtagtacgggcggttattggagtttgcggttgtcgttgaggtcgtttttggttatttgggggcggttcggggtttattttgttagaggttttggtttggggttgtttatttttttttcgggttgtcgggtttggagtttcgttttcgtttttttattttttgtataaatttttttttttttttaagtttttttggcggaggcggaggtaaatcgcgcgttgttcgggcgtttattggtcggattggaagggggcggagcgcgttttttttgggcgtcgtagggaagattggcggggggcggtgtttgggttggggcggggttgggcgcgcggggtggggcggttttcgtggtttttacgttttcggaggtgcggagtgggaattcggaggggattttgggaagtttcggtgtttttttcggcgatcgtttagtcgtttttgaattcggtttttagtggggttattattgaaatcggcgatcgttttcgtttcgttgtttgtcgttcggagtgtattattttttgaattttttgttcgcgggtcgtaatatttagatcgtggaagagagggtagttgttttaggattttatttagggttggtcgagaaaggagaagaaatacggtgtttgcgttagcgcgtgcgtttcggggttagatttgggtgcgtttagcggacgtggtaggtgggtgggtgggtgggtattagattgggcggggaaataacgaagaatttatttttttattataaaaggagttggagttagttggtagtgtttagattgcgggttgcgtttggtcgggtatt

SEQ ID NO: 21 - DNA, 5473 bp, Artificial Sequence
  chemically treated genomic DNA (Homo sapiens)
gtaatgttaattagttttattttaaagaaaaattaaatattagagtaaataatgatttttttgcggagaaggagttgtaagggttggggagaggtaattagtgttataaaagttttattataaagaagtttagaatttttttgttttgttgtgtagtagagtgaaatatagtagtagaataattgtgtattattattatgataatttaatttgtttttttagaaaaagttattgtttgtagttaggatagtaggaaaatatttagaaaataattaaaatgtaaataaaagtatgaaataataataaagtttattttttaagagaaaaaaagaagagtatttagcgaaaggagaatgaagtatatataaagtaagtaatttttaggtattttgtttttttggatgttatttgtttaaatttgataatttttataggtagtatgatagattttttaaaatttaaataaagtttgtttttgtattttatttttaataataaagtatattgattgatttataaattaaagtttttaaaattttattaaagtaaaaatattgttttagagtttttattggtatgtttttgaaagtaagtgttatagttaatgtaaatttttaaaaatttttttgttatttagtataatagagggtggattttgtgttagggtggtattttttgtgtaatttatatggtttgaggttttttgttttttttttttttagaagagttggaattaagatattaataattataattgtaataattattattatgtttttaaggggttgttgagtttttggagattttagtgtatagagcgaagtaggagaggtttaaaaaggaaggttttgttgttgatgttgtgatgattaaggtagtttattattattttttttttttaacgtgattgttttgttttttttttttttgattttgttataagatgtggggaagttttttaagaattgtgtatagttcgttatagatggtggtttttgtgtttagagatcgaaagagtatttgttatagcgatattttgtaatagttgtagatgtgcgggtttaaaattgttttatgtgtttaaattaataataattattattttattttattttattatttgagcggaaatataatttgaaatatttaaatttgttttttttaaagttagaaggatatgtgtatgtgaatgtatataatttgtttttttaaatgtttttaaagtttatttttgttattatatttgtttttataattaataaagaaaatttgttttagttttaattttattgggtatggtacgtgttggagggtaggttttggaaatataaatattaatatatgtggtttgttttaaaatttaatgtatttagggttagtttcgttgttttggttaaatgaatgaataaagagtgattaaaatgcgtttattttttcgttattttatatatagtttgagatcgatcgttaatagtagattgtaaatttttgtatttaatagttattaattttttttatagtttgtatatttataaatttaattgggatattcgtttgataaatttagattttgtagagtagatttttaaggaaatttaattttagagaataaaatattttttggaatttttaaggtatttagagataaaacgttttttgtgggatttttttttaagttttataaaagtaggtttattaggattaaattatattaaagttagtgcgaggtaaggggggtgtggtttatagaaattttgggagaaagtttagtatagttttttttttttgggaatatatgttaggatggaaaaaaaaaaaaggaggggagtgttataggattaagatttattttggaaaataagatttttagtaaagatattttttttttttttattttatattagatattagaagtattatttttcgagtgtgttttttaagtttttttttaattttaggttttttttgttttttgggttttcgattttttggtagttgggtatttgtattcgggttttcgataggtttagtcgttggtttagtttttttcgtatgaaggcgtcgggatagtgggtttcgttaaaaagtttttttagtttattgagttgttttagggtgaaattggttcgatttcgtttttgtttgattttggtttggttttcgttttttatttttttcgtattttttttgcgattttttagtttcggggatattggagggggtattttagcggggttatacgtgtatttatacgaatatatatatatacgtatatatatacggacgaaaatagtatagtaaattttgttattagatttgtcgtaaaaaagaatagagaatttttttttttcgtggaattttggttcggttttttaatttattcggaggaagaatatttcggagaagcgtaaaggttaagtttgagcggtcgtttggggtaaggtgggtagttatttattattttttttataaacgtatttcgatttatcgttttattatttattttttagttatcggttttttttagtaaatattaaatggtttttatttattttcgtatttatttgtttcgtagtatttatagaaattaaaggcgtagcgttaggttttttatagagtaaagtttggatataagggcgcggtaaggttatttattggttttttatatcggttatttttagaaggttggttcgtttttaggttagtttttattatcgttggttttttgtttatcgtaaatttgttggtttaatttaggaataattgggtcgaaaggtattagcgagagtaatagatttcggtgttgtgtcgtatagggagtcgtattcgtagacgtttttcgttgtttttgggttcgggttaaattttgtataaggttttttggatagttaggtaattttcgtttcgtttgttcgatcggggtcgtacgagtataggcgtttacgttatgttggttgtttaaagggttcgtcgtttaagtcgggttagaaggtaggaggcggaaaattagttttcggtggcgggcgaaagtaatcgttttttttgtttttttttcgttttttttcgtggaaacgtagattcgattttaaacgtttaatttatagagattaataggtttaagcggaatattcgcgattttcggtttttattggttgtttaaagtttttttatgtaattagtagttcggatgtttaataaaatatgaatttttttgttttgggtttgtatatattcgttgttatttttttgttttttttttttttttaaaaataggagtttttttagtgtgagtatatatagttattatatatatatttttttggaatttttattttttgcgttcgaattagagatttcgggttttaagaagttaaagttgagtttagatagtcgaggttgtttgtagttttttttagcgtaggatttaggttagtatgggtgttaaaaattattttcggaagagtcggtttgtagagaaattaatatttgttttgagtttggaaattaataattttaggaattgcgttcgtcgggggtttagatttgaatttcgtcgttaggcgcgttggcgaatttgtagttcgggtttgtagttgtggatttatggtcgggaggttgtattgggtattttgacggtaattttattattttataaatttaggaagatttggtgttggtttggaggaagaagagtcgttagatttcggttttgtcgggtattttagttacggtgattttaaatattgtcgtattttttagtttttagagttagttttgtggatatttgttttttttttaggaaggaatattatagtaaatattatgggttaatttaatagtaaagtatttttattgatattgtattgaaatttaaatatgaaaatatattttttaaattttgttaatgaggtgggaaggttttgtttattatatgttatttatatagtggatgttatttaaagttttggggtttcgaggagatgtttaaattttaagttgatttatagatttaataaaatttttatttttgtttttaaatttttaattattgatttaaataggaatagatcgtgttataaataatttaattgtttgtttaaatatgtgattttacgtatgttatatatttttttaattggaaaaatatggtagtatattagttattgtaggtattaagtgttaaattaattttattgttgaatttttttgaattggtatagaacgttttgttattgagataaagacgttttttaatattgagttagtattaaaggatttttgttttaagagaatcgagtattgggtgattgaaaatattaaaggaattgtgtaaatatagatttttatttttttcgtcgtttttttttttcgtttttaatatattaagaaatcgaaacgtttcgttcgggagaagtagcgtagtttggattttagttttcgttggtttttttttattttgaaagagaatgggaagttttggtttttaagatttaaagatttaggggttttgcggagttcgaggggttttggcggttttaaatatttaggcgatcggagggttaagttttttatttttgttttttttttttttcggtaaattttgcgttagaggttagttttagtttcgtcgtttggtttagtatttttttttgtagttcggtttcgcgaatttttacgttcgtttgcgggttattcgggttgcgggtttattttttcgttggtgaaaaatgtatttcggtggaatgggaatatttgggaagggcgcgtataaattttatacgtttttttttacgttatttttataatatattaggattttatttatgatcgagtatattatcggatttttatttttttattattattttagttgataaagttggggtttagggtttttttcgtgtttttttttttttttcgttgggtttcggagttttttttcgttcgagaggagttcggaaggcgggaaggggaatcgttgtcgggggttagttaggtcgttatttttcgttagtcgcgggttgttcggttttttgtttttttcggcggcgtttatgtttagttttcggacgggagagcgtttttttttagttttttcgtttgttttttttttttttatatttttttcgtttttttcgtcgtcgttttcgtttttttcgtcgtcgttttcgtcggtcgttcggattgtcgggttgttgcggtcgtcgcggttcgtttcggtgtagtcggtcggttttttggtttcgcgtagcggttcgttttttagtatttttcggtacgtgatcgtttttttttttttttttattttttggttaaaagatttggagacgaacgtcgtaagtttttttatcgtcgtcgtacgttagttcggcgtttaatttttgttagtagagtttcgtttttttttttttttttttttttttattgttttagtttttttaataataatatattaatgggataggaggtgggg

SEQ ID NO: 22 - DNA, 5473 bp, Artificial Sequence
  chemically treated genomic DNA (Homo sapiens)
ttttattttttgttttattgatgtgttattattgggggggttggagtagtaaaaaaagaagaaggaaaaaaagagcggggttttgttggtagaggttgagcgtcgggttgacgtgcggcggcgatggaagaatttacggcgttcgtttttaagttttttgattagaaagtgaaggagaagaaggaggcgattacgtatcgggaggtgttggagagcgggtcgttgcgcggggttaaggagtcgatcggttgtatcgaggcgggtcgcgacgatcgtagtagttcggtagttcgggcggtcggcggaggcggcggcggaggaggcggaggcggcggcggaggaggcggaggaggtgtaggaggaggaggagtaggcggaggagttggaggagggcgttttttcgttcgggagttggatatgggcgtcgtcgagagaagtagggagtcgggtagttcgcgattgacggagggtaacgatttgattgattttcggtagcggttttttttttcgtttttcggatttttttcgggcgggagaggatttcgaggtttagcggggaggggagagggatacggagagggttttggattttagttttgttagttagagtgatagtggaagggtgggggttcggtggtatgttcggttatgggtggggttttagtgtgttgtgggggtggcgtggggggaagcgtgtggggtttgtgcgcgttttttttagatgtttttattttatcgaaatgtattttttattagcgggaggatgggttcgtagttcggatggttcgtaggcggacgtggaagttcgcggggtcgggttgtaggagggggtgttgaattagacggcgggattaaagttagtttttagcgtagagtttgtcgggagggagaaggggtagaggtggaaagtttaatttttcggtcgtttaggtgtttggggtcgttaagatttttcgaatttcgtagagtttttgaatttttggattttaggggttaaaattttttatttttttttaaggtagaaggaagttaacgaaagttgaggtttaggttacgttgtttttttcgggcgaggcgtttcggttttttggtgtgttgggggcggggggggggggcggcgggggaggtggggatttatatttatataatttttttagtgtttttaattatttagtattcggtttttttagagtaaaaattttttggtgttagtttagtgttaggaaacgtttttattttaatggtagagcgttttatattaatttaaaggagtttaataataaaattgatttggtatttggtgtttgtagtaattggtgtattgttatatttttttaattaagaaaatatgtggtatgcgtggaattatatatttaagtaagtaattaagttgtttatgatacggtttgtttttgtttagattagtaattggaaatttggggataaaaatagagattttattaagtttatggattaatttgaaatttggatattttttcgaagttttaaaattttgagtggtatttattgtgtagatgatatgtaatagataaagtttttttattttattggtagaatttgaagggtgtgtttttatatttaaattttaatataatattagtaaaaatattttgttattaaattggtttataatgtttattataatgtttttttttaaagaaaggataaatgtttataaaattaattttgagaattagaaaatacggtaatatttaagattatcgtagttagaatgttcggtagggtcgagatttagcgatttttttttttttaaattagtattaggtttttttaaatttgtaaagtggtggagttatcgttaaggtgtttagtgtagtttttcggttatgagtttataattataggttcgaattataggttcgttagcgcgtttgacggcgaggtttaggtttgaattttcggcgggcgtagtttttgggattgttgatttttaagtttagggtaagtattaatttttttgtagatcggttttttcggaaatgatttttaatatttatgttggtttggattttgcgttgggaagaattgtaaatagtttcgattatttaaatttagttttgattttttaaaattcggagtttttgattcgggcgtagaggataaaggttttagggggatatatatatggtggttgtatatgtttatattagaagagtttttgtttttaaagggaggagaaggataggaaagtggtaacggatgtgtgtaaatttagagtagaaaaatttatattttattaaatattcgagttgttggttgtatgaaaaggttttgagtaattaatagaaatcgaggatcgcgaatatttcgtttgaatttgttgatttttgtgggttaagcgtttagggtcgagtttgcgtttttacgagggagggcgaagagagaatagaaagagcggttgttttcgttcgttatcggaggttggtttttcgttttttgttttttggttcggtttgggcggcgagttttttgggtagttaatatggcgtgggcgtttgtgttcgtgcgatttcggtcgggtaggcgggacggagattatttggttgtttaggggattttatgtagggtttggttcgagtttaggggtagcgaggggcgtttgcggatgcggttttttgtgcggtataatatcggggtttgttgttttcgttgatatttttcggtttaattgtttttaaattagattagtaagtttgcggtaggtagagagttagcggtggtgagagttggtttgagaacgagttagttttttgggaatggtcggtgtgagaggttagtgggtggttttgtcgcgtttttatgtttagattttgttttgtgagaggtttggcgttgcgtttttgatttttgtgagtgttgcggagtaagtgagtgcgaaagtgagtggaaattatttggtgtttgttggggaaggtcggtgattggggggtgaatagtgaggcggtgagtcgaggtacgtttgtgaaggaggtggtggatgattgtttattttgttttaggcggtcgtttagatttgatttttgcgttttttcgggatatttttttttcgggtgggttgagaagtcggattaggattttacgagggggaaggattttttatttttttttgcgataaatttggtaataggatttgttgtgttgttttcgttcgtgtgtgtgtgcgtgtgtgtgtgtgttcgtgtggatgtacgtgtggtttcgttggggtgttttttttagtgttttcggagttgaaagatcgtaaagaggatgcgaaagggatggaggacgaaggttagattaaaattaagtagaggcgaagtcggattaattttattttggaataatttaatgagttggagaggttttttgacgagatttattatttcgacgtttttatgcgagaggaattgagttagcgattgggtttgtcggaggttcgagtgtaggtatttagttgttaggaggtcgagggtttagggagtagagagagtttggggttggaaagaggtttgggggatatattcgggaggtggtgtttttagtgtttggtgtaagatgagaaggaaagagatatttttattagaggttttattttttaaagtagattttagttttatagtatttttttttttttttttttttttattttaatatatgtttttagaagaagaaagttgtgttgggtttttttttagagtttttataaattatattttttttgtttcgtattggttttaatgtggtttaattttaatgggtttatttttataaggtttaaaaaaaaattttatagaaaacgttttatttttggatgttttaaaagttttaaagagtattttgttttttggagttggatttttttgaaagtttgttttgtagggtttaggtttgttaagcggatattttaattaggtttatagatgtgtagattataaagaaaattagtaattgttaagtgtagaaatttatagtttgttgttagcggtcgattttaaattgtgtgtgaaatagcggagaaataaacgtattttggttattttttgtttatttatttaattaaggtaacgaaattgattttaaatatattagattttaaaataaattatatatattagtatttatatttttaaagtttgttttttagtacgtgttatatttaatgaagttaggattgaaatagattttttttattggttgtggaggtaaatgtaatagtaaaaataggttttgggggtatttaaaggagtaaattgtgtatatttatatatatatatttttttagttttagggggaataaatttaaatgttttagattgtattttcgtttagataataaaatagaataaaatgatagttattattggtttgaatatatggagtagttttaggttcgtatatttgtagttgttataaagtatcgttgtaatagatattttttcggtttttgggtatagagattattatttgtagcgaattatgtataatttttaaggggtttttttatattttgtaataggattaggaaaaaaaaaaatagagtagttacgttgaagaggaaaagtaataataggttgttttggttattatagtattagtagtagagtttttttttttaagttttttttgtttcgttttgtgtattgagatttttagaggtttagtaattttttaaaaatatgatgataattattatagttatgattattagtattttaattttaatttttttaggggaaaaaaaggtaagaagttttaggttatgtgaattatataaaggatgttattttggtataaaatttattttttgttgtattaaatagtagagaaatttttgaagatttatattgattatgatatttgtttttaaaaatatattaatgaaagttttgaagtagtatttttattttaatggggttttaaaaattttaatttgtgagttaattaatatgttttattattgaaagtggaatataaaagtaagttttatttgaattttaaaaaatttgttatattgtttgtaaaagttgttaagtttaagtaggtaatatttaggagaataaagtatttaagagttatttgttttatatatattttatttttttttcgttgagtgttttttttttttttttttaagaagtgaattttattgttgttttatatttttatttatattttagttattttttagatgtttttttattattttaattgtaaatagtggttttttttaaagaagtaaattagattattatgataatggtgtataattattttgttattgtgttttattttgttgtatagtagaatagagaaattttaaatttttttgtagtgaggtttttatgatattaattatttttttttaatttttataatttttttttcgtaaaggagttattatttgttttggtgtttggtttttttttaagatgaagttaattaatattat

SEQ ID NO: 23 - DNA, 5328 bp, Artificial Sequence
  chemically treated genomic DNA (Homo sapiens)
ttgataagagaaaaggtgttgagggtaggtcgcgttgttttatttatagtttattgtttgttgtagagtttttgttaggattggaaagttaatttagtgttgattaaaagtattatagagttaaaggattggtaatgattgttaattttattttagttttatgtatttttaattgttgtaattaaagatacgttatttaaatataggtgaagggttttttttttttaagttgggttgggggggggtgggtgggtggattataattttatttagattttttattttatttgggtgttatgtagttttaaattagattttattattattattatttagagtcgttttttgttatttatatttggttttgtagaatcggaagtgtgaaatgtgttatttatataaaagtttttgtttaaagaaagggtgggacgggggagtgtagaggagtaattatttaggggtgatttaaatatttaggtttttttttttttttttttaaattaatagaaaggttttcgatatagttaaaagtatttgaaattgggggtaaggttaataggttaaagggattagtgttagttttttaagtatttttaaaaagattatgtgaatagatggaaaaatatatttttaattaaataattttttttatattatagttgtagtgttggtttagaaatcgtgtaattttttattcgataggagtttttttatgagaatattaaaggataaaaagttttgtattttcgtagttggttaaaattgataattatttttttatgcgcgcgcgcgtatatatatatatatatatatatatatatatatattaatatatatatatatatatatatatatatatatatatatatatatttttaaaaaagaatttagtttttaatttttttttatttacgaagattaaagttttgtattcgatttcgcgagcggttttcgtttttcggggttggaattcgatttagatgtgaagcggtattgagtcgttgcgtaggttcgtgtttagcgttttttgttggatatagtaggagttgcgtagcgttagttttagaaatcgttggaattttgttttggggttagagaaaatttttttattgttttttaaaaaagaaacgggatgcgaaaataaatttttatatttttgaaaaataatataatattaatttaataaaaaattaaagaggcgatattataattttaatttaataaaaaataaagattgttttttttatattttagttattttttattcggtttggttttgtaatttttttgaaaggttttgcgatggtaaaataggtaaagaaaagtgacgaaaaataaagtatttttttgtagtcgtggagaattaagtaaagtatatttttttcgttttgtttatattttaaaaaattaaacggaagatgttgttgtttgttgttttgacgttgttagtagcgttttgaatgtttttagaggttttgtaagtatcgtaattgagttttcgagtaaacgaaataatttgtttttatgtgtttatttttagagtataattaaaagattagttttttttttgagtgttttttattttttagattaattttggttaaagttttttttttttagatattggttaagaaatatatattggttaagaaataggtgtttggtatttttttttttttattttagtcgtaggatttcggggaaggtgtgttaatggtagggaaggttttttttgaaatttagtatttcgttgattaggaatttaaattattttagggaagggggagtatttttatatttttaaaaaattatttgtttatataataaagagttttgttttttttattattattattttttttttttttttttggttagtaagtgagggtaaaagtagtttttgaattattttagaaagagaaattgtaaaaatggtatattttttgaatttaaaataatagggaaatgtgggtttgtttaattgtttaaaattaaatagaaataattattgtgttaaatgaataagatgttttaagatttatatttttagggttatggttattgattttaattttatttttaagaagtttagagatcgcgtttttaaagtttgtttattgacggaaatcggtttaattttttataaaagaatggttttttaaaatattgaatattatggttatgtaaggtttatgatatttttatgtttattttttttattttttaaaattagcgaattcgagataatattttaaggggaattgttatttagtgcgatgagagatgatttttttatttggttttagaattagatttcggtttaggttttttagtaagtaggtttagatgtaatggaaggagagaagaattaagttttttgataaaatttttatttcgaattttatggaaaagataggtaagcgggattttagttatagtatttttattttttgttttattaaaaggtttgtttttattatagaaataatatagtcggtgttagttttgtgaattcgcgttaatcgataaggtaagaaacggtgcgttgatagtcgaggttcgaaggttgtttagtggttttcgtagttcgtggggtagggaggttaaagttagtaaaatgttggaggcgacgttagaaagagagtatatgtttgttattcggaagtgatgtcgaacgtgtaatagtagagttttggagatttttatttcgtttcgtatttagggattttagtttgtggggtagtaggttgttgggtgaaggtaggagggagaagtcgtatttggttgagggcgggtgggcgtgtcgggagcgagtgtttaattttttagggtttatggagaaagtataatttttagttgaggaaagagagttaaataagtgggtggtttaggtttgggaatgttatttagttttttcgacgtagtgttatttttgtggttttagggggttttagtatttgttcgaattttattttttaaggtcgttagtaggaaggtagtttttttatttttgagggttgaggagggggtagcgagtgatttgattttttagtagtagggaaaatcgtagcggttggtaacgggtcgcgttttttcgcggcggtaaagcgttttttaggggcggggcgggtatttttggttttttgttttagcgtttaggtttgagttcgcgcgggttggttgggcgttttgttttgtaagtaattaattttgttggattttgaggattatttaggcggatgggtttatttagtttaggtttattgagattttgttaattttttagattttttttttttttattttttatattttttatgatgaatttaggaaagaattcgaattttgaaaaatagtatatgtggtttgaagtttgatagttatttgggtgtgagggatatgattttattaataaagattaagatttaaggttgagtttttatttattaaatttgtttttttattttgtttttaaattttggagattttttagtttcgttgttttaattttgatatagataaaggcgttagggagaaagtttaggcgggtttgaagtagttgaggtatagattgatatttatttttttattatttagacgggtagataagtattgttagattgggggttttaatttagggtttagcggttacgtgggttgttgcggggtgttgaaattataagtataatttgatattattgagtttacggtgtttgttaataatttgtgaattaggtgtagagattgttattgtagattataatagtttttgaaggatttattatagtttatcgtgttaatgatttttaaattaaggaggggaggtggggcgagacgaaaaaggagtggggagagttagtaaaaagggaagaagggtgggagggaagataaaagttagagttttagtttcgaaggagtttttaaagattattaggttagcgatttgagaattttattgggatgggtttggaaatttaattttatttgagttaggattggaagaggggcgttgggggtaagtagaagtgggtttttgggaaggtcgattttttaggtattttttttgaggtcggaatagtttttgggagagggttttagatgttaatgggaggttttgaggatgttagttcgtttaggatgggtgtatattttgatttagagtattttttagggtaagtcgtagttgtagatttttgaaaaaagtggtaatagtttcgtttagggatgatggtgattgtaggatgattttttttttttaatggtttgttttaatttttttttatgttataggtgaaagttttttttttttttttttgatagtatttttgtttgttttttatatgttacgtagatttaatttttttttttaatttgtttttttgggtgttaaatatattagttttttgagattttattatttttgtggtttgtattgagtttaattgtaattttggaaagggaatttgtggataatatagtagtagtatgttttataagattttagaagaaagaagattaaattttatttatgcggtgtggtaggggttaggttaagggaaagaggttttttttgtttggtaaattgtttttgtagtgaaagggtagtttagtttttattggagtgttatttaatattggttagagaaaggttaaggaaagtgtaggtttgttttttttataaaagttgtggttataattaaacgaagtaattatagttggagaatttaaaataattgttttttttttaaaatgagggtaataattttagttattggaaaattgggattttaaggaaaatttttttttttggtataattaattgtataagatagtgtggttaattagagatatatgtatttagatttaagtaatgatttataggtgtaaaaggtttagtggttttttgggttatttggagtttttattgattattttgttttttaaaaaatttttttttaattttaaaaataaaagttatagatttaatgtaattgaaaattattgatggtagttttttaggtttttagtttatgtttttaaagggaatttatatttaaaataattaaattatttaatggttatattatatttttttttggataatagttgtagtgtagggatagaattttaatttatattaaaattgtttgataatttagaaatggaaatgaaattgtgaattaatttttttagaaaatatttgagttagaatataagaaggatgtttatatataatattgtaagtaatatgatgattattatatgtagtttgaaagatttatataaatgattatatattatttttgttgttataatttaaagtaaggg

SEQ ID NO: 24 - DNA, 5328 bp, Artificial Sequence
  chemically treated genomic DNA (Homo sapiens)
tttttattttaaattatagtaatagaagtagtatataattatttgtgtaggttttttaagttgtatataataattattatgttatttatagtattatatatgaatattttttttatattttagtttaaatattttttggagaaattaatttataattttatttttatttttgaattattaagtaattttaatgtaagttaagattttatttttgtattatagttgttgtttaggagaaaatgtagtgtgattattaaatgatttaattattttaaatataaattttttttaaaaatataaattgaaaatttgaagagttgttattagtggtttttagttgtattaaatttatgatttttatttttaaaattagaagaaaattttttaaaaggtaaaatgattagtaggaattttaggtagtttaaaaagttattggattttttatatttgtaaattattgtttgagtttaaatatatatgtttttgattgattatattattttatgtaattaattatattaaaggaaaaggttttttttagaattttaattttttagtggttagggttattatttttattttagagaaaaaatagttgttttaaattttttaattgtgattatttcgtttagttgtgattataatttttgtgggaaaaataaatttatattttttttaatttttttttagttagtattaaatgatattttagtgaaggttgggttatttttttattgtaaggataatttattaagtagggaaaattttttttttttagtttggtttttgttatatcgtataaatggaatttagtttttttttttttggaattttatggaatatattgttattgtgttatttataagttttttttttagaattatagttggatttaatataaattataaaagtgataaaattttagagggttgatgtgtttggtatttaaaaaaataagttggggaaagaaattagatttacgtaatatgtgagggatagataggaatattattagaggaaaaggaagaaagtttttatttgtggtatgaaaagaagttaaagtaaattattggaaaaaaaaagttattttataattattattatttttaaacgaaattattattattttttttaaagatttgtagttgcggtttgttttggaaagtgttttaaattaaagtgtatatttattttgggcgggttggtatttttaaggttttttattgatatttagaatttttttttaaaagttatttcggttttaaaagaaatgtttgagaagtcggtttttttaggggtttatttttgtttgtttttagcgttttttttttagttttggtttagatggagttgggtttttaaatttattttaatggaatttttagatcgttggtttgataatttttaaaggttttttcggagttggggttttgatttttatttttttttttattttttttttttttttgttggttttttttatttttttttcgtttcgttttattttttttttttaatttgaagattattgatacgataggttgtaatgagttttttagaaattgttatgatttatagtgataatttttgtatttaatttatagattattgataagtatcgtgggtttaatggtgttaagttgtatttgtggttttaatatttcgtagtaatttacgtagtcgttgggttttggattaggatttttagtttggtagtgtttatttgttcgtttgagtgatggagagatgagtattagtttatattttaattgttttaagttcgtttgggttttttttttggcgtttttgtttgtgttagggttggagtaacgaaattgaaagatttttagagtttgaaaatagagtgaaagagtaaatttaataaatgagagtttagttttgaattttagtttttattaatagagttatgttttttatatttaaataattattaaattttaaattatatgtattgttttttagagttcgggtttttttttgggtttattatgaaaggtgtgagggatgaaggggaaaagggtttgaggagttggtagggttttagtgggtttaagttaagtgggtttattcgtttggatagtttttagaatttagtaagattggttatttataaagtagggcgtttagttaattcgcgcgggtttaggtttggacgttgggataggagattaaaaatgttcgtttcgtttttaaagggcgttttgtcgtcgcggagaaacgcggttcgttgttagtcgttgcggttttttttgttattaaggaattaagttattcgttgttttttttttagtttttaaagatggaggggttgtttttttgttggcggttttggggagtgggattcgggtaggtgttggggttttttgggattatagaaataatattgcgtcgggagagttgggtggtatttttaggtttgggttatttatttgtttagttttttttttttaattaggggttatgttttttttatgggttttagaaagttgggtattcgttttcggtacgtttattcgtttttagttaggtgcggttttttttttttgtttttatttaataatttgttattttataggttgggatttttgggtgcggaacggggtggaaatttttaggattttgttattgtacgttcgatattattttcgaatagtaggtatatattttttttttggcgtcgtttttaatattttgttggttttggtttttttattttacgggttgcgggaattattgagtagttttcggatttcggttgttagcgtatcgttttttattttatcggttggcgcgggtttataaaattagtatcgattatattatttttgtaatggggataagttttttggtagagtaaaaggtgggggtgttgtggttggaatttcgtttgtttgttttttttatagaattcggggtagagattttattaaaaggtttgatttttttttttttttattgtatttgaatttatttattaaaaaatttaagtcgagatttaattttggaattagatggagaagttattttttatcgtattaaatagtaattttttttgaaatgttatttcgaattcgttaattttgggaggtgggaagaataaatataaaggtattataaattttgtatagttatagtatttaatattttaaaaagttatttttttatgaaaaattaagtcgattttcgttaataagtaaattttaaaaacgcgatttttaaattttttaagggtaaagttaaaattaataattataattttgaagatgtaaattttaaaatattttgtttatttagtatagtaattatttttatttgattttaaataattaagtaaatttatatttttttattgttttaaatttagaggatgtgttatttttatagtttttttttttgaaataatttaaaggttatttttgtttttatttgttgattaaaaagaagaagaagaaataataataataaaaaaggtaaagttttttattatgtagataggtagttttttggaagtgtaaaaatatttttttttttttaggataatttggatttttggttaacgaaatgttgaattttaaagaaaattttttttattattggtatatttttttcgaaattttacggttaagatgaaagaaaaaagatattaggtatttgttttttagttagtatgtgttttttagttagtatttgggaaggaaaaattttgattaggattggtttaggggatgggaaatatttaaagaagagattggttttttaattatattttggaaataaatatataaaagtaagttatttcgtttattcgaaggtttagttacgatatttgtaggatttttgagggtatttaagacgttgttgataacgttaaaatagtaagtagtagtatttttcgtttaattttttgaaatgtggataaaacggaggaagtatattttgtttgattttttacggttatagaaaaatgttttgtttttcgttatttttttttatttgttttattatcgtagaattttttaaaagagttataaaattaaatcgggtgggggatggttgggatgtgaggaggatagtttttattttttattgaattaaaattgtagtatcgtttttttagttttttattgagttaatattatattattttttaaggatataaaaatttgttttcgtatttcgttttttttttggagggtaataaaagagttttttttaattttagagtaggattttagcgatttttgggattggcgttgcgtagtttttattgtgtttaatagggggcgttgggtacgaatttgcgtagcggtttagtgtcgttttatatttgagtcgggttttagtttcggaaggcgagagtcgttcgcggggtcgagtatagagttttagttttcgtggataaaaagagattaaaggttaaatttttttttggggatatgtgtgtgtgtgtgtgtgtgtgtgtgtgtgtgtgtgtgtgttggtgtgtgtgtgtgtatatgtgtgtatgtgtgtgtgcgcgcgcgcgtatgggggggtggttattaattttaattaattacgaaaatgtagagttttttattttttgatgtttttataaagaaatttttatcggatgagaaattatacggtttttgagttaatattgtagttatagtgtgggggaaattatttaattaaaaatatatttttttatttgtttatatgatttttttagaagtatttaaaaagttgatattgatttttttggtttgttaattttgtttttagttttaaatatttttaattatatcgaaggtttttttattaatttgaaggagaaaaaaaggagatttaaatatttaaattatttttaaatagttatttttttgtattttttcgttttattttttttttaaataggggtttttatgtgagtgatatattttatattttcgattttgtaaagttaggtataaatgataaggagcggttttaaataataataataataaaatttaatttgggattatataatatttaagtagagtagaagatttaaataaaattgtaatttatttatttatttttttttaatttaatttaaaaaaaaaaaattttttatttgtatttaaatagcgtgtttttaattatagtagttggggatgtatgaggttgaaatgaaattagtagttattattagttttttaattttgtggtgtttttgattagtattaaattagttttttagttttaataaagattttatagtaagtagtgggttgtaaataagatagcgcgatttgtttttaatatttttttttttgttaa

SEQ ID NO: 25 - DNA, 4324 bp, Artificial Sequence
  chemically treated genomic DNA (Homo sapiens)
gttttttagtattattattttaaaggtatttttattttttttattattagggaaggagtgtgtagttttgatttagttttttagtggagtaaagggaatttagaggaagggggatttttgtagaaattgttagttatataagtaagttttttttggtttttcgttttattaaaagtgaaaaattgtttataggagtgtttatgttttttgtttttttatgtattattagagttaagaggggatttcgttagtaaggtattttttgttttgtttcgtagattatagttttcgatttttattttattgtttgtgtaatgtgtagaattggagtttaaagtagcgggtttaggattattttttaggttcggcgggtttatagattttttttttggttgggaagaggggttttcgtgaaagtagagtttgataagttttagtattgttatggttaagattattaatattattattgttgtgtttataaatatgaagattacggtagaggaggagtcgaaagtttgaggagtggtagaggaagtcgtagaattaaatttggaaattacgttttttgatggggtgatagtggtttttgattcggtttgaagggatatttgaagggtagatatcgtgttttgtgatttttatcgaggaattttaggaatagatgttattgaattgttttgtttagggataagtggtgttttttttagtttttcgtcgattttgattggttatgttttttgcggtacggggttggttgtagtggtcggcgggcgtttggtgggtatttcggtttttttaagggtcggttgtttttttttattggttatataagagcggtcgtttttttttagttcgaagttcgtagtatattcgtaggtaaagttttttaagtcgtttaggtagttagggagttttgcgtatttgttagtacggaggtatttttcggggtagggatataatatatcgttcgagagtttgttttagcgagcgtcgatttcgttcgcgatgtaagtaattgagatcgggagttgttttcggtagagcgtatttatttcggttttaggtggattgaagtttagagcggcgttgtgtagttggaagggcgcgcgatagtttaagttagaggcggtttcggggcgcggcgtaggatataagattttaaattggtatttgtataggtagtcgttggcgcgtaggtggtatcgtatttttttttagtttgcgggttcgattttatcggtggtttggagtatcgcgtattttcgcgcggtgtaggagcgttggggtttttttatttattgtagcgtgtcgttttcgagatcgtcggggtcggaggatagttaggagaaatttcgtaaaggttcgttttttagggtgtagtgggaacgtttgcgttttagtgcgatttagaatagtaggtttttggagtttttttcgggttttgggtttgttcgtaggagcgcgagtatagcgcgtagttcggcgttcgtacgtacggtgttgagcgttttatttcgtaggatgtaggttttttcggtcgtttgtcgttttatggtagcgtggtgtaggttgtagtaggttttcgaggtcgagtagttagtacggtcggtagtggggtgttcgtcgtcgttcggttcgggttagagcgtttgttagaggaggtatagggcgaacgtcggttttattttttgaggtttcgtacgtagagttgtttttaatttggatttgtttcgttcgaggacgtagagttgtgtttggagcgcggttatcgttttttatagttggtttttttaattcggtttttttttttttttttttcgttttcgttttcgacggattttttaattgttaagaattttttcgcgggtttagcggttaatagttttttttaggtcgcgataggaaatgtgtgcggagcgttgttaggttcggtgtagttttgagttattttggggttaggaatatagttggcgtcgggtataggggacgtagtcgattagaaggttaaatattttgtttagagtaagaggagaaattcgttattgggatgaagtgtgtggttttttttcgtttagggagttttattaggatcgtagaatttataatacgtaagcgaatataggtaggaaggatttgagaaaggaattggtttatgattataagattacgttcgtttattgtgtttttgttcggagttgtggagttagcgttagaataattcgtagacggttttagtgtttggggggtttgtgtttgtgggggaaaaatatgttgtgaaataatttagtaattgtttttgttattagaggtagtattatttaatcgtatatttttttatgggtttttgtttttttattatgttaagagattttaggagttttaattattaaagaatttggagttgtttgggtattttaaatgggaaattttgttttttttattagtatttgttttagaaatttattttttatttttacgtgtttttttttgagttagattatattgatttattatagaaaggaaatgtatttttaggattaaatgaaaaataatgattatagattttaatagttaggttgttagttttttttgttattgtattggtttaaaaattttttaagtttataggttatatataaatgagttcgtggttttataaatattcgagaataattgttttatgtgtgattttagttttgaattattttagtattatttttttttatgattgagtggtagtatttataatagtaagttgtaaatattttttttaaggaaaattagagttttttaagaaattaaaatgtttattttattataatgaatattgtatattgttaaaaaatattttgtaatttgaaagatgggtgagttaatttttttagaattttagtgggtgttttgttttaatataaatattttaatttagtgggaagtggtaaggaattaaagatgaataaagaagtaaaggttaaaaattgtattgttatgaaaggattttttgttagtaatttagataatttagtattagtttagaaaacgtatattttattttggtttataatggttaaatacgttgttattagaaatatatagagagttttagttaagtttttttagagatgtttgatgtttttaaatatttttaattagaatgaaagttgttattttatggataatgtatataagtttattttgttttattgtatttaggttgatgaggggtgggagggaaggttttaggattatatttgtatgtttttattttatttttattataatttttatttttttttttttttggaaattttatgtattttaataaataatagtaagtttatgagttattattatatttattttgtttttgttgagtatggagttttgtattaggattttttttttgttttattttttaatttaaagaatattttttagttttttttttagatgtttgagaattattttaaacgtggttttgcgtttaaattaggtaatttagtgttttataagaaagaaatatgaaaatttagaaattaaattgaatggtttttaaaaaatatttagttatttgggttagttttttatagattattgtaattttatgattgtgtttgtaaatgtgtttatgtagtgtaatatttttaataaaattttttttaaatttaagtagttaatggaaattttttagatagttttaaaaatcgtttgggatgagatgaggtgtttatagtaagaaagaatgaatagttggaaagtttaagtaaatatatgattttattttttgatattttgtttaggggagtgggattatagtagagaatatattggttataacgattatatgagagtattgattatgattatgattatattatggaatgatataagagttagaaaaaattagtttaaagtaggacgtaaatagttttgtaattagtttgaaatagatagtttatttgattaaattagaaatggaggaaagtttttattttttaataatatttattaagataataatatagaattattttatttttattggattttaaatgtttaaaaattttataatattaaatgtgaatttattggtttttttatatgttatagattagagtaattattttggaaaaatttgatatttttttttattaaaattgaatatttgtaaattttagtatttttatgataaggtataaaattaagagaaatttttgtatatgtataatagaagatatgtaaaaaatgtttatagtgatattatttatattaataaaacgttgaattaattaaaatatttaaaaatagtataaaaataaat

SEQ ID NO: 26 - DNA, 4324 bp, Artificial Sequence
  chemically treated genomic DNA (Homo sapiens)
gtttatttttatattgtttttggatattttgattgatttaacgttttgttaatatgaatagtgttattataaatattttttatatattttttgttgtatatgtgtaaaaattttttttagttttatattttattatggaagtgttagagtttgtaaatatttaattttagtgaaaaaaagtgttaaatttttttaaagtggttgttttaatttgtaatatgtaaaagagttaatagatttatatttggtattataagatttttaggtatttggaatttagtgggggtaaaatggttttatattattattttaataaatattattaaaaaatagaaatttttttttatttttaatttggttagataaattgtttattttaaattaattataaaattatttacgttttattttgagttaattttttttaatttttgtgttattttatgatatggttatggttatggttagtatttttatatagtcgttatggttaatgtgttttttgttataattttatttttttagatagaatgttagggagtgagattatgtatttatttaagttttttagttatttatttttttttattgtagatattttattttattttaaacgatttttaaagttatttaagaaatttttattgattatttaagtttgaaaaagattttattaaaaatattgtattatatggatatatttataaatatagttataagattgtaatggtttatagagagttggtttaagtgattaagtattttttaaaaattatttaatttgatttttggatttttatgttttttttttataagatattaagttatttaatttaaacgtaaagttacgtttaaggtgatttttagatatttgaaggaaggattaaggaatgttttttaaattgggaaatagggtaggagagaaattttagtgtaaagttttatatttagtaaaagtaaggtaagtatgatgatgatttataggtttattgttgtttgttaagatatatggaatttttaggaggaaagaagaatgagagttatggtaaaaataagatggaagtatatagatgtgattttgaaatttttttttttattttttattaatttgaatgtagtaaaataaagtgagtttatatgtattatttatggaatggtaatttttattttgattaaagatatttaaaagtattagatatttttaagagggtttagttgaaattttttatgtatttttgatggtaacgtatttggttattatgaattaagatagaatgtacgttttttaaattgatattgaattgtttaagttgttaataagaaatttttttataatagtatagtttttaatttttatttttttatttatttttaattttttgttattttttattgagttgaaatgtttatattaaaataaaatatttattggaattttaaagaaattggtttatttattttttaaattataagatattttttgatagtatataatatttattataatggaataaatattttaattttttaaggaattttaattttttttaaaggagatgtttataatttattattataaatgttgttatttaattataggagaaaatgatattaaaatagtttaaggttaaaattatatatagggtagttgttttcgaatatttataaggttacgaatttatttatgtataatttataaatttgaagaatttttgaattaatatagtggtaaggaaagttaataatttaattgttaagatttatggttattattttttatttagttttagaaatatattttttttttgtaatgaattaatatggtttaatttaaagagaaatacgtggaagtgaaaaataaatttttaaagtaagtgttgatggaagaagtagaattttttatttaaaatatttaaataattttaaattttttagtagttaggatttttgaaattttttgatataatagagaagtaaagatttatagagagatatgcggttaaatagtgttgtttttggtggtaaaagtagttgttaagttgttttataatatattttttttttataggtataggttttttaaatattggagtcgtttacgaattattttgacgttaattttatagtttcggatagaaatataatagacgggcgtggttttataattataagttagttttttttttaagttttttttgtttatgttcgtttacgtgttatgggttttgcggttttgatgaaattttttgaacggagaaaaattatatattttattttagtggcgaatttttttttttgttttaagtagggtgtttgattttttagtcgattgcgttttttgtattcggcgttagttgtgtttttgattttagaataatttagggttgtatcgggtttggtagcgtttcgtatatattttttgtcgcggtttaagggaaattgttggtcgttgggttcgcggggggatttttggtagttggggggttcgtcgggagcgagggcggaggggaagggagggggaatcgggttggggaagttagttgtagagggcggtgatcgcgttttagatatagttttgcgttttcgagcgggatagatttaagttgggagtagttttgcgtgcggggttttagagaatgaggtcggcgttcgttttgtgttttttttggtaggcgttttggttcgggtcgggcggcggcgaatattttattgtcgatcgtgttggttgttcggtttcgggggtttgttatagtttgtattacgttattatgaagcggtaggcggtcgaggaggtttgtattttgcgaggtggggcgtttagtatcgtgcgtgcgggcgtcgagttgcgcgttgtgttcgcgtttttgcgggtaggtttagggttcggagggggttttaaagatttgttgttttgggtcgtattggagcgtaggcgtttttattgtattttggagaacgagtttttgcggggttttttttggttgtttttcgatttcggcggtttcgaaagcgatacgttgtagtgggtggaggagttttaacgtttttgtatcgcgcggagatgcgcggtattttaggttatcggtggggtcgagttcgtaggttggaaggagatgcgatgttatttgcgcgttaacggttatttgtgtaagtattagtttgaggttttgtgttttgcgtcgcgtttcggggtcgtttttaatttgagttatcgcgcgtttttttagttgtatagcgtcgttttggattttagtttatttgggatcgaggtgagtgcgttttgtcggggatagttttcgattttagttatttgtatcgcggacgaaatcggcgttcgttgggataaattttcgggcgatgtgttgtgtttttgtttcgggaggtattttcgtgttggtaaatgcgtagagttttttaattgtttagacgatttgggaggttttgtttgcgaatgtgttacgggtttcgagttggggaaggacggtcgtttttgtgtgattagtggggaaggatagtcgatttttggggggatcggggtgtttattaggcgttcgtcggttattgtaattagtttcgtgtcgtagagaatatggttaattagggtcgacgagaagttgggagagatattatttgtttttgaataagataatttagtaatatttatttttgagatttttcgatggggattatagagtacgatgtttattttttaaatgtttttttaagtcgagttaaaggttattattattttattagggagcgtgatttttaagtttaattttacgattttttttgttattttttaggttttcgattttttttttgtcgtggtttttatatttgtgagtatagtagtagtagtgttggtgattttgattatgatagtattggggtttgttaagttttgtttttacgaaagtttttttttttagttaaggaaggagtttatgggttcgtcgggtttggagagtgattttgagttcgttgttttgggttttagttttgtatattgtataaataatggggtgaaagtcggggattgtgatttgcgggatagagtagagggtgttttgttggcggagtttttttttggttttagtgatgtatagggaaataggggatatgggtatttttgtgaatagttttttatttttgatgaaacggggaattaagaggaatttatttgtgtaattgataatttttgtagaaatttttttttttttaaattttttttattttattgaggagttaaattagaattgtatattttttttttgatgatagaggaagtggaagtgtttttaggatggtgatattgggggat

SEQ ID NO: 27 - DNA, 5683 bp, Artificial Sequence
  chemically treated genomic DNA (Homo sapiens)
ataatgttaaatgtaaattttttgttttgtttaatgtttttattttatggttggtaaataaaaataataaaatagtattgataataataatagaaataattaattgaagttgtagtttttaatttttttaaagataataggttaaagtgaggtttttataataagatgttagttattaggaaggaagttagggaaaatttttttttagggggtaattgatttttattggtttaatattgtatgtagtattgagttaggaggttttatggagaagtgtttgtttttttttttttgttgttagaataaagtttataaataattttgttttttttatatttttggagttagttagttagggtttttatttatgtttaggggattagatttggatatttgtaaaagaattgaatatagatggatagttaagaaaaaaataaatgttaagattattattatttatagtttaatgatttagtaatttaaaaaaatttaagaataataaaataatttttaagaaggataagaattttaaaatatgtagtttagaaaattaaattttttaggtttagagtttaagtaaaagaaaatttgagataatgaagtttggaatattgggtttgtattttgtttttgattttgtgtttttgggtaagatattgaatttttttattttagatttattttatattttaaggagggtgtaggattttgtagtttttttagtgatggtatattattaattagaattttaattagttttatttttattattttagtaaaatgatgttaaaaattagatttcgtgatatgagagaagaggggaaattaattatagattataaagaaattgtgggatttaagtttagggtgaggtgttttattgaatttttagggttggttatagtatttgttatatagtaggtatttaataaatgatgtgtaatgggtggttagattgatggaaaggtaggtttttttagtgacggtaaaggatttggggtaaaagagatttgtggttgagttttgatttttatatattagtatattgattagacgaagttataagttttaatttttttttgtgtaaaatggagataatattttatagggttatgaggattaaataagaaaatgtttagtttagtgtttaatatataggaagtatatcgtaaatattagttattattattattaatattgtgattatattttttatttaaagatttttttgaggagtagggggtatttagagataaaaagtttgtaggtgggaaatttgttagttttttagggcgttaggtttttgtggaattttgtattttttttttgttttagtttttaagaatagaaattttttagggatttttggtgaggtagtcgtgggaagatgaggtgtagaagtaagttgggatttgtgagttttaatttcggttttttttgcgttgagatttaagcggattttgtttggtttgtatgcgttattgggggaaatggacgtgggtttgagcgcggtaggtgcgagggcgttgtttcggggtcgattattttgcggggatattgtagttgttatttttttttttgtaggcgggtaggggaagcggtggttaaagtgggagtcgatcgtttagtatagtttgtttgagtgttgattaggaaagtttaggttttttttaaatttcgtcgttagatttggtgacgtattcgtatgtatttaaggcgtttgtacgtagaacgttattatagaatgtagttattttttttaacggttcgggaaattagaggtttttttagttatttagggtagaggaattttttttatttttatgtgatattttttgatttagaagaattaatgttagattttttttgggtttttttatttatagttatagttttttttttgtttagttaaaattgaggtaggtaggaaaatattattgggggtataagtttattagtgtgtaaacgtatttttatgaagtgtgtttttagggagttattaaaaattgattttttaattatagaaatagatgagattttgagaatattgagaagttgttttttgtaaagtaaatttgtaatggtttttgacgaaggggggtcgggggcggggagaagtttagtcgagagaggagtttattttacgttatatttttgtagttgaaaagttgtttaattatcgttaatcgtttttcgtataagagttttgggaagattttagaaataaggtaaatgaagattttttattgtttttttcgggttgtcgttttcggaagtcgaagttttagtacgtagagtagtaggagagggttatttttaggtaattttattgagtaaaataaattatttaatggtataacgttttggtttaaaaaattggaatttattagaggtaaaaatattttttaagaaattatggatatttcgcgttttatttatttttatggtagtagagtatttgtattttgagttatttatatagatttatgtttcgtatcgtttttattttttttttttttgaagtaaagtttttttttaagaaggcggttagaaagtggattttatcgggggaaaaagaaaaatgaaacgtaaattagtttggtattgtttgcgttttttaaaacgcggtgggataaggttattgagtttatagttaatttttttatgtatataaaatgtatatatatgtatatatttttatatatataaaagaatttatatatatgtatatagttatgtggagttttgaagtaattttttatgtttttgttttttttaagttttttaggtggaggtagttataagtattataagtcgttttagtgattattagggacggaaatcgttaattattacgtttttttttatttttaggggttttttggttcgtgatataagaggtttcggtattggcgtttttttagaattggtttagaggagttagtttagagtgtgaggtcgggtttgtattgaacgtatatatcgaggtttattagattttttcgattttagcgaagggtgttgattgttgtgttgttagaggttagtaagttttttgtgcgtagttgatgagttttagtaattcgttatttgggcgtttttttttaaattttgggagtaaattgggaaaataaaaaaatttttacgtttattggttttttttttttttttaattttttttttcgattcgtttgtgggagtttttttttttttgttgggattataatgtgatgcgtaatcgtttgtgaatgaataaaagttatcggtaagtagggagacggggatagatcgttgacggtagattgagggtggtagtaaaggttcggtttttaaggataatggggagtcgtttttttttacgtttggtttttatggtttttttcgttttttaggtaaaatgaatgtttttttatttattattcgtagagtatttttaggcgtgcgtagaatttgttgatgaaatttattagcgtcgattgggtagttttgtggagttattcgaggttttttattgtggtttttgtttgtagaatttaagtatttatataatgtattagtacggaatttagtattcggtggggatatcgcgtgttaagtttggcgcggttaacgttttagcggtttttttattcggtagttttttaggattattttcgaggaggtattggagtcgggttgtaggcgtacgggtaaagaatttagtattttatttaagtatttcgttttttttggtcgttttcgggaggttatgtttaaaaatataaaaataaaaataaaaataaaaataaagggaggcggataaagtttcggtgggtgaattgaagttgggtttatgtgattttgaagtcggagaaataaatttaatatgaattttgtttttttggcgggcgttgggatttcgtcgttttttatgttaatcgttggaagtttcgtatttaacggttataggtgtttaggagcgtagagaggtttcgggtttaaattatcggcgcgtagggattggattcgcgggtagcgatttttttaattttttttttttcgttttatatatatattttcgcgtcggttgaaagtatggaggatttagggtatttgaaaaaagaggggttgggcgcggtggtttacgtttgtaattttagcggtttgggaggtttagaagggcggattatttgaggttaggagttcgagattagtttggttaatattagtttggttaatatggtgagatttcgtgtttattaaaaatataaaaattagttaggcgtggtgtttgtaatattagttatttgggaggttgaggtacgagaatcgtttgaatttgggaggcggaggttgtagtgagtttagatcgcgttatcgtttttttgttttgggtgatagagtaaggtattgttttaaaataaaataaaataaaacgaaagattcggttaggaaagaatttgtaggtattcgaggcgttcgtattttgtaaagtaaatgtaatttttttattaagtcgaagttttttatatttatttttttagaggaaggtggtttaatttagaaattttttttaagaggattttttatcgaagattatcgcgaagtgttaggaattcgttttagtttcgataggtgtaggatttttcgtgtcgttatattttgggattttatttttttaaataggttatttaaaagttagtagtgtaatcgggatttcgcggcgataaagaattattgtgtagaattttggagttgggagtcggttcgttttttttttaaagaaatcgggatttcgcgtttttttcgtcgttagcgtagcgcgttagcggcgtttaattagtgagtttttcgggtttgtgacggttttcggtttcgttttttcgacggttataaaaagtcgtagcgaagtttgtattttcgagtatcgcgcgcggttttgttttcggtacggtttttaggtgcgtttttttttcggttgtttgtagtattggttttattgttttcgtcgttagttatcggttttttattcgttttattttttattgtggtttggttgagtcggtcgttaggtttcgttgtttttttttgtttttttttttttttagcggtcgtattttgcgtcgtattttatttggtttgtaggtgagtagtagcgtagtatttttgttcggcgagtttaatttgtttagttcggtttttgtcggagtggtatcggtatttttttaagacgtttttttttttgtaggatgaagaattttatgttggaggtggtgtttttattattggagaagttgttttttatttttaattttacgttttttagttcgggcgtcgcgggcgaagataaagggaggaatagtttttatgaaattagttttttttatcgaggcgacgtgttggaggtgtttcggatttatttgatttattatggtatttatttaggagataatcgtgttgtttatatgatgttcgatattttgttggttttgatagacgatatggggcgtacgtagaaggtggtttttaataagcgttttattttgggcgttattgttaaagtggttagtattcgcgtggatatagtggaggatttcgtttacggagttaatattttggttaattatttggacgagtttttttagaaaaaggtattgtttaacgaggaggtggcgcggagggttgaaaagttgttgggttttat

SEQ ID NO: 28 - DNA, 5683 bp, Artificial Sequence
  chemically treated genomic DNA (Homo sapiens)
gtaaagtttagtagttttttagtttttcgcgttattttttcgttgagtagtgtttttttttggagggattcgtttaggtgattgattaggatgttagtttcgtaggcgaagttttttattgtgtttacgcggatgttggttattttgataataacgtttaggatgagacgtttgttggagattattttttgcgtgcgttttatgtcgtttgttagggttaataggatgtcgggtattatgtgggtaatacggttgttttttaggtagatgttatagtgggttaggtgggttcggggtatttttagtacgtcgtttcggtggaaagagttggttttataaaaattgtttttttttttgttttcgttcgcggcgttcgaattaaagagcgtgaagttggagatgaggagtagtttttttagtagtaaagatattatttttagtatggggttttttattttgtagggaagagggcgttttggagaggtgtcggtgttatttcggtaggggtcgggttgggtaagttaagttcgtcgggtaggggtgttgcgttgttgtttatttgtaggttaggtgaggtacggcgtaaagtacggtcgttgaggagagaggaaggtaaaggaggatagcgaggtttggcgatcggtttagttaagttataatggggaatgagacggataaggaatcggtggttgacggcggggatagtgagattagtgttataagtagtcggagaaggagcgtatttgggggtcgtgtcgggggtagggtcgcgcgcggtgttcggaggtgtaggtttcgttgcgattttttatggtcgtcgagggggcggagtcgaaggtcgttatagattcggaaagtttattgattgggcgtcgttggcgcgttgcgttagcggcggggaggacgcgggatttcggtttttttgggaggggggcgggtcgatttttagttttagggttttgtatagtgattttttatcgtcgcgggatttcggttgtattattggtttttaagtggtttatttagggaggtagagttttaaggtgtggcggtacgaaaggttttgtatttgtcgggattggggcgagtttttggtatttcgcggtagttttcggtggaaagtttttttgggagagatttttgagttggattatttttttttaaaaggatagatatgagggatttcggtttaataaagagattgtatttattttgtaaagtgcgagcgtttcgaatgtttgtagatttttttttgatcgaatttttcgttttgttttgttttgttttgagatagtgttttgttttattatttagagtaggagggcggtggcgcgatttgggtttattgtaattttcgttttttaggtttaagcgattttcgtgttttagttttttaagtagttgatattataggtattacgtttggttaatttttgtatttttagtagatacggggttttattatgttggttaggttggtgttggttaggttggtttcgaatttttgattttaagtgattcgtttttttggattttttaaatcgttgggattataggcgtgagttatcgcgtttagtttttttttttttaaatgttttgaattttttatgtttttagtcggcgcgagggtgtgtgtgtagggcgggggggggggggttgggggggtcgttattcgcgagtttagtttttgcgcgtcggtgatttgaattcgaggtttttttgcgtttttaggtatttgtggtcgttgagtacgaagtttttaacggttggtatgaaaaacggcggggttttaacgttcgttaggaaagtaagatttatgttaagtttattttttcggttttagggttatatggatttagttttagtttatttatcgaaattttgttcgtttttttttatttttatttttatttttatttttatgtttttaagtataatttttcggagacggttaaggaaggcgaagtatttggatgagatgttaagttttttgttcgtgcgtttgtagttcgattttaatgttttttcgagggtggttttagggagttgtcgggtgagggagtcgttgaagcgttggtcgcgttaggtttggtacgcgatgtttttatcgggtgttgagtttcgtgttaatgtattatgtaaatgtttaaattttgtagataaaggttataatggagagtttcgggtggttttataaagttgtttagtcggcgttaataggttttattagtagattttacgtacgtttgagggtattttgcggatgatggatgaaggaatatttattttatttggaagacgaagggggttatagagattaggcgtgagggaaaacggttttttattatttttggaggtcgggtttttgttgttatttttaatttgtcgttagcgatttgttttcgtttttttgtttgtcggtgatttttgtttatttataaacgattgcgtattatattatagttttagtaaagaggagaaaatttttataaacgagtcgaaagaggaagttggagaaggggagagagttagtggacgtggagatttttttatttttttagtttatttttaaaatttaaagaaaagcgtttaggtggcgagttgttgaaatttattagttgcgtatagggagtttgttagtttttagtagtatagtagttagtatttttcgttaaaatcgggggagtttgatagatttcggtgtgtacgtttaatgtagattcgattttatattttgaattggtttttttgggttagttttgggaaagcgttaatatcgaagttttttgtgttacgggttaaagggtttttggagatgaaaggaaacgtgataattaacggttttcgtttttggtggttattaaggcggtttataatgtttatgattgtttttatttggggaatttgagggagataaaagtatggagaattgttttagggttttatatagttatatatatatatatgaatttttttatgtatataaaaatatatatatatgtatatattttatatatatgaaagaattagttatagatttaatagttttgttttatcgcgttttggaagacgtaagtagtgttaagttgatttgcgttttatttttttttttttttcggtggggtttattttttggtcgtttttttgggaaagggttttattttaaaaagaaaggaggtgagagcgatacgaggtatgaatttgtataggtggtttaagatgtagatattttgttgttatggaaatgaatagggcgcggagtgtttatagttttttgaaggatatttttgtttttgataaattttaattttttaagttagaacgttatgttattaagtgatttattttgtttagtggaattgtttgaaagtaatttttttttgttgttttgcgtgttaggatttcggttttcggaagcgatagttcgaaggaggtagtgaaaagtttttatttgttttgtttttgaagtttttttagaatttttatgcgggaagcggttagcgatgattaggtagttttttaattgtaaaaatatagcgtggaatgagtttttttttcggttggattttttttcgttttcgattttttttcgttaaggattattgtaaatttattttgtaaaaggtagttttttaatgtttttaaaattttatttatttttgtggttgagaggttagtttttaatggttttttggaggtatattttataaaaatacgtttatatattaataggtttatgtttttaataatatttttttatttgttttaattttagttaaataaagggaagattatagttgtaggtggaaaggtttaagagaaatttaatattagtttttttaaattagaagatgttatatggagataggagaaatttttttattttgagtagttggagagatttttggtttttcggatcgttaagaaaggtggttatattttgtgataacgttttgcgtgtaaacgttttaaatatatgcgaatgcgttattaggtttggcggcgagatttagaaagagtttggatttttttggttaatatttagatagattgtgttgagcggtcgatttttattttggttatcgttttttttattcgtttgtagaagaaggaatgatagttatagtgttttcgtagggtggtcggtttcggggtagcgttttcgtatttgtcgcgtttaggtttacgtttattttttttagtaacgtatataggttaagtaagattcgtttgggttttagcgtagaagaggtcgaaattgaggtttataggttttagtttatttttgtattttatttttttacggttattttattagaggtttttggagagtttttgtttttaagaattaggatagggaagaggtgtagagttttatagaaatttaacgttttagaaggttaatagattttttatttgtaggttttttatttttggatgttttttgttttttagagaagtttttggatggaagatatgattatagtattagtaataataataattaatatttacggtgtgttttttgtgtattaggtattgaattaagtatttttttatttaatttttataattttatgaggtattatttttattttatataggaagaaattgaagtttataatttcgtttagttagtgtgttaatgtgtggggattaggatttaattataggttttttttgttttaggttttttatcgttattgggaaggtttgtttttttattagtttaattatttattatatattatttattgaatatttgttatatggtaggtgttatgattaattttagaggtttaataaaatattttattttaaatttagattttataatttttttgtaatttgtaattaattttttttttttttttatgttacgaggtttaatttttaatattattttattgggatagtgagaatagagttggttaaggttttgattaatagtatgttattattaggaaggttataaaattttatattttttttagggtgtaggatgaatttggggtggggaagtttaatgttttatttaagggtatagagttaggagtagaatgtaggtttagtgttttagattttattattttagatttttttttatttgagttttaggtttgagaaatttggttttttaaattgtatgttttaaaatttttgttttttttagggattattttgttgtttttggatttttttagattattaaattattgggttataaataatgataattttaatatttgttttttttttagttatttatttatatttagtttttttataaatgtttaggtttggttttttggatataaataggggttttaattagttaattttaaaggtgtggggaaaataaagttgtttgtgaattttgttttgatagtagaggaaaagaagtagatatttttttatggagttttttaatttagtgttatatgtagtgttaggttaatagggattaattattttttgggaggagattttttttggttttttttttggtgattagtattttattatgaggattttattttagtttattgtttttagaaagattaaaagttgtagttttagttggttgtttttgttgttgttgttaatgttgttttgttgtttttgtttgttaattataaaataagaatattgaataaaataaagaatttatatttagtattat

SEQ ID NO: 29 - DNA, 2347 bp, Artificial Sequence
  chemically treated genomic DNA (Homo sapiens)
ttgaggtttaagttagggaggtcgagattgtagtgagttttaattgcgttattgtattttagtttgggttatagagtaagattttgtttaaaaaataataagaaaggtggaggaaataggtagagattagaggaaagttatggtttttttttgattattttgagatttttttaattttattaatttttggagagttttttatttgttttattttatagattgggaaattgagtttaggggtatttagattatttgaggttttagttggagatgaagagatggatttaaattattttttgtggagtatagttttgttttttttagagtggagatcgtgttttagggttttttttattcgtattaaggttggtttttttaggttttattttttttatttgtaaaatgggtttttgtgagtatgaaggagggtttggtttgtagtgagcgttgtttattcgttggttagtgtgattagttattgttgttgttttttagtggtttttgtttggtagttgttggaaaaatatcgagggagggagatatagggttggggaggtgaaaagttggatatagacgtttttagttttttgggattaggaatagatggaggtcgggtgttttgaagtggagtagggaggattgtttggaggagggatatttgagttagaatgtatagaattatagggtattttcggtagaggttatagtagaggtaaaagtttagaggaggtgttttggggattattaagatggatatagtgggtttgggtttttgtggggtgatgggttggggtttcgagcgttaggttaaagggtttggtttttttcgagggcggtagggagttatggtaggtgtgtgagttggaggggtattttagataaaggtgaagtggtatttttttttttattgaagttataatttgatattttttttgaagttttttatattttattttttttttgttatattttggtaagtttattttttttttttcgtttttaggtttgttaagaggttttgtgggttttttatggttttatttagttgttttagaagttcgtttgagataagtttttagggttgttttatttttaggtgttttatagattcgggggcgggtgaagtaggaaggatcgagttacgagggttttagaaaatatgacgggaggaattatagtatttttttatttttttagttttcgtttttttagggagagagatttttagttcgaggaggagggtcgagtttttttttatgtggtaagagattttaacgtcgttgaggattatttaaagagggtgttgaaggatgtataggagttagttaggagataatttatttgttaatttaataaatttataggtattatttattaataagaataatttttattatttaattaggattttttaatgtttttgagggattatttgaggatgtttaattattatttttatttgagatagggttttattttgttatttaggttggagtgtagtgatataattatagtttattgtagttttaattttttagttttaagttatttttttattttagtttttgatatagttgagatataggttaatgttattatgatgtttggttttttttttttttttttttttttttatttttgagatagagttttgtttagttatttaggttggagtgtagtggtgcgattttagtttattataattttcgttttttgagtttaagtaatttttttgttttagttttttgagtagttgggattatagatatgtattattatatttagttaatttttgtatttgtagtagagatggggttttattatgttgtttaggttggttttaaatgtttgattttaagtgatttgttggtttcggttttttaaagggttgggattatcggcgtaagttatcgtttttcgattatttagtttttttttttttttttttagtttttggtagaaatgtggttttatgtttgtattttagtattttgggaaggtcgaggtgggtagattatttgaggttaggaattcgagattagtttgattaatatggagaaatttcgtttttattaaaaatataaaattagtcgggtatggtggtttttgtttgtaattttagttatttgggaggttgaggtaagagaattatttgaatttggtaagcggggtttgcggtgagttaagatcgtgttattgtattttagtttgggtaataagagtgaaattttgttttaaaaaaataaaataaaataaaaatataaaattagttaggtatggtggtacgcgtttgtaattttagttatttaggaggttgaggtaggagaatcgtttgaatttggtaggt

SEQ ID NO: 30 - DNA, 2347 bp, Artificial Sequence
  chemically treated genomic DNA (Homo sapiens)
gtttattaggtttaagcgatttttttgttttagttttttgagtagttaggattataggcgcgtgttattatgtttggttaattttgtatttttattttattttatttttttgagatagaattttatttttgttgtttaggttggagtgtaatggtacgattttggtttatcgtaaatttcgtttattaggtttaagtgatttttttgttttagttttttaagtagttgggattatagataggagttattatgttcggttaattttgtatttttagtagagacggggtttttttatgttggttaggttagtttcgaatttttgattttaagtgatttgtttatttcggtttttttaaagtgttgggatataggtatgagattatatttttattaaaaattgaaaaaaaaaaaaaaaaagttggatggtcgaggggcggtggtttacgtcggtaattttagttttttgggaggtcgaggttagtagattatttaaggttaggtatttgagattagtttggataatatggtgaaattttatttttattataaatataaaaattagttgggtgtggtggtgtatgtttgtaattttagttatttaggaggttgaggtaggagaattgtttaaatttaggaggcggaggttatagtgagttgaaatcgtattattgtattttagtttgggtgattgagtaagattttgttttaaaagtaaaaaaaaaaaaaaaaaaaagaaaagttaggtattatggtggtattggtttgtgttttagttatattagaggttgaggtagaaggatagtttgaaattgggaggttgaggttgtagtgagttatgattgtgttattgtattttagtttgggtaatagagtgagattttgttttaaataaaaataataattaaatatttttaaatgattttttagaggtattagaaagttttgattgaatgatgaaaattgtttttgttgatgagtgatgtttatgagtttgttaaattaataaatgggttgttttttggttaatttttatgtattttttaatattttttttagatgatttttagcgacgttagggttttttgttatatggagggaagttcggttttttttttcgggttgaaggtttttttttttgagaaggcggaagttgaggaggtggggaagtgttgtggtttttttcgttatgttttttggggttttcgtgattcgattttttttgttttattcgttttcgagtttgtggggtatttgaaagtggggtagttttgggaatttattttagacgagtttttggggtagttgggtggggttataaggggtttatagggttttttggtaggtttagagacggagggaaggaggtgggtttgttaagatgtggtaaggggaaggtgggatgtggggaattttagagggagtgttaggttgtgattttaataaggggagaaatattattttatttttgtttggggtatttttttagtttatatatttgttatggttttttatcgttttcggagaaagttaggttttttagtttggcgttcgaggttttagtttattattttatagaaatttagatttattgtgtttattttggtggtttttaaagtattttttttggatttttgtttttgttgtggtttttgtcggagatgttttgtaattttatatattttagtttaagtgttttttttttaggtagttttttttgttttattttagggtattcggtttttatttgtttttgattttaaggggttaggggcgtttgtgtttagttttttatttttttagttttgtatttttttttttcgatgtttttttagtagttgttaggtagaggttattggggaataataataatgattaattatattggttagcgggtggatagcgtttattgtaagttaagtttttttttatatttataaaagtttattttgtaggtgggaaagatgaggtttgagagggttaattttggtgcgggtgggggaagttttgaggtacggtttttattttggaaggggtaaaattatattttataaggggtggtttgaatttatttttttatttttagttggggttttaggtggtttgagtgtttttggatttagttttttaatttgtgaaataaggtaagtgagggattttttaggaattggtggagttgggagggttttaggatggttaggagggggttatgatttttttttgatttttatttattttttttattttttttgttattttttgagtagggttttgttttgtggtttaggttggagtgtagtggcgtaattagagtttattgtagtttcgatttttttggtttaagttttag

SEQ ID NO: 31 - DNA, 6709 bp, Artificial Sequence
  chemically treated genomic DNA (Homo sapiens)
atttttaaattttttaatttatagagggttggagagttggtattatgagtttttagtttttacgggtgagaaaagaggtgtttgtgtggagggtaggtgcgatttcgggggttagtagagaggagaggttgcgggaggattcgttgcgaagggcgaggggtggcgttgggtgggacgggcgtttggggtcgtgtagggtggtttttgggtgttgttcgggttgtttgtcgtttagtattggcgtaggaagacgggttcgcgtagcgtttggtaatagtggtttgttttacgtttggaggcgattaagttttgagttaaaggcgtcgggtttagtcgggaagtgtatggcgatttagaatacggagcggagaaggttttaggggatacgaggttatcgttttagttttcgggtttgcgtttcgagcggttagggtgcgtacggatgggtttcgggatgttagtggagaggtgataggagtttattattttacggttaagcgtgtgaggttttcggcgggcgggggtttttttcggggtagggtagggggagagttaggtatgtttttaacgggttttttagtagaatcgttaggaaagtggtttttaattttaggtatttttgtggtttttaggtagttgggcgattaaaaatttatttttgtttgttgtgaaatgggataggtggttgttaggttagagattgtgtttacgaagtttcgtttggcgggtcgggattgacgtggattcgggtttttttcggaagtttgggaatttgtgagttttttagtttttcgttttattttgtttgtttgaaaaaaggagttgtttgagaggaagagttaaggtttaaaaggttttaaacgaagagtatgcggtttgacgcggagcgtaaagaagcgagtagtgaattgaatttggtgggattgagattagaggcgtttgtatgcggcggtcgtttcgcgttttattaaagtaatttgttatttacgataattatttttgtaattattttggagtggttgtgatttgatgtttgtggtgttttagggtatgtttttattggatatagatattttagggtgttttttgacgttagtgtcggtttagtgggtgttagtgtcgcgaagggagggtggcgggcgtgaatgttttttttttttgggtttgtcgtaggtttcggtttttttattttgtttgattttggcgggtttgttatttattgaggtttttatcggcgtttacgttgtttcgagaggcgggataaacgttcggcgcgtggcgcggagtttgcgaaagcgttcgggggtttttattttttgttcgggagttttttttttggggcgggaagaggagtcgtagatttgttcgaattttgttttattcgtttggtcgttttttttcgtttggggtgggggtaggggtggcggatgatttaggtttggggtcgggagttttgtttttaaaggtattatttcgcgtttttttggaagtggcgcgttgttggggcgttttcgttgttgtagaggtttggtttgcggttttataggggcgtgggtttagggtttttagggagtaagtgagtttaggttttttagggggcggtagaggggaattttcgataattttttatttttttttttaggcggttgcgaggttttcggggttttagaggggtttttttttgtcggtgtcggttgttttgagcgcggttacgtagttcgcgtttttacgtgggtaaggggcggggacgttggagggaggttgttttggatgttggagttttcggttttcggttttgttgagtagaaaagttgaagttaaggaagggttgaggtttttttataagggcgcgcgcgtgtttgggtgtcggtttagaagtcgagaatgtgcgtattggggaagggtttttcgtgtcgagaagatagaggatttgttttagttgtttttcgtatagagggcgcggaggttgcgttttagttcgaacgtttatttattggaaagagggtagcgtcggggtttagggaagttttttgggaatgaatggtttttgttaagcggtttcggattttttgggttttttgggtttacggtacggtgttgcgcgagtttttagtgtttatcggtttttttcgttttttgcgtagacgtttttaggcggggaggtatatcggttttttcgggtagttttggttagtgttgttgtgggaaaggagagttagggtttgggatgggggatgagtatttttttgtttatttcgggttttagcgtgtaggaggtaaatttgttagtatagataagatagtttgtttaagttgtattttaggtcgggttagagaataaaatcgagggttagaaggtttagaatgtcggatagtttagcggtattcgttagggagttttaggcgttcgaaagaggcgtcgtatttttggcgagtttaggatttatttttttggatttgtgttttggagtgtttgcgggtttgggtttaatttttgtttttggtaggtgtttttttttttcgtcgttaatattaggagcgttgtttttgcggtaatttattttatttttagaagtttgttttgggatcgaagtgttagggttttgtgtgtttttttatgtattgttttttttagtgtaaagttttgtagatatgtttggtcgaaaagttttagtggttttaatttttagattttgttttcgcgttcggtcggaaaattatttgggatttggttgttgtttaaggtcgggggaaagttttttttggaggacgtttattattattatttttttttaggtttatttgggtttaaataaatgttaaagtttaaacgaattcgagaaggaatagcgaggtagtggatgtcgttatttcgtggatgggagagttatgtttattgtaggtgcggatatcgtattgataggtattgattattgtaaaatcgtatttagtattaaatagaaatagttttgttttttaatttttatagaatgtttaaatttagtttagggagttagttggggcgttttaataaatacgttttcgagaattagcgatgttttttttataatgaaagttaattgttgtataataattgggttaaagaatttcgttagtttaaattttaaaaattagtattgtattttgtttttaagtttgggtggtaagtatcgaaggggagagggaagtagcgtttgtgtggaaggaagtttcgttttttgtttaaatatgtgggatttgggtgtttatttttttagtcgagagttttttgtaggtttttttttaattttttgtatttttttatttttattttattcgtggcgttcgggttttatttttgttcggcgttttttttttagggcgagtagaggtttttgagtgatcggttcgttagaggtagttgtagagtcggcgtttcgtagggtagggtagggtcgggtcgttgggttggtttagtgcgcgcgggttttttttggttttagttagtcgcgggagatgttatttcgggcgatagcggcgagacgtcgttgttcgtaatttttgggcgggtaggatcgtttgttgtttttgcggtttttggggtagattttttaggagttttttttttttttttttcgttcgggggtcgggatcgcgttgtgtttacggagggaattgggcgtttttggcgtattggggttttagttgtatgattttagtttagattttaagttttagtggggtgtaggtgggatgggatgtgtttttaggagatgaggagatttcggttgttgagtcgttttttaaatgcgtagttttttaattttaggtgatattcgttttttggaggaacgagtgaaggtcgtttaggcgaaagaggggtgggttttagtatttggatttttttttttagttttgttaattttaggtgtgtttacggtggaggtgatagaaggaaggcgcgtcgggggatttaggtttcgtaggttttcggttgttaacgaggtatcgtttattgatttcgcgtttcgttttttatagcgtggggttcggcgttgcgttaggttcgggtgcggggcggagttaggttgggattggttgggggtcgtttcgttcggcgtttgggttttcgcgtcggttttcggggaggagttatgataattttttttttattaaggcgttcgggtttttcggttatcgttaggatatattgttcgggcgcggtttttttcgttcgcggagcggttttgatattcgcggcggtagtatttacgttcgtagagtcgtcgatgcgtgtttagtgattcggatagtaaggttcgcgcgcggcgggggcggcggtagacgtttggttatcgtgatttcgattttggatttatcgtttgggggttggggggattttggatttaattggcgattgttttgggggacgtcggacgttatgttgtggaaaataatcgataatgttaagtacgaagaggattgcgaggtgagttggggtttcggggtgtagtttcgtttcgtcgaggatagttcgggaggtaggggttattggatcgaggtcggggacgagggtataggagttttggtttttcggtgggacgggatttattttttcggatattttttagtttatttttgcggggttttttttttgtatagggtttttttttaaatagttttttttcgggaacgaggtttggaaagagaatggtaaattttatttatatagtttatcgggcgtttttttaagcggtaaatagttttgtttttcgttttttcggaaaagtgtttcgtttgtaatttttagacgtggtttttacgtacgaagtttttgtttaaaggggttagatgaggttatttgttagcgatattttggcggatatttttttaaggtcggtttgttatttgtttcgttattttttcggggaagtacgaaaataatcgaagtttggtttttaaaagaagtgggggttggggagtggtggtgggggtgttcgaggttagatggggtcgtaagagttcgcgagtgttttagtttgtcggataggttgagttagagtttcggagagtgggagggaagaaggaggcggcgagcgggaagaggaagaagacgtaggtagcgttaggcgagtttaggggcgtcgggagcgcggagttcgggttacggattcgcgggagtttattgcgttttcgggttttggagggttgtttttgttcgtaggttcgggcgttttcgttaggaggcgatagcgttatgtttttttaggttttcggcgtttcgagatttttgggtagatggggacgtattttttagaaattgagtcgggtcgtttaggggcgagggaacgtgcgcgggtaaggttgtttaatttttagggttttttatgttttttttgcgtttcgacgtgcgagaatattgtttttggtagtgtagggcgtttttatttattatttttttcggttgggttcggttagtagggagggtcgttttgtgcgcgcgttttttttttattttttagggcggcgtagggtggcgggttttgtttttcgagcgtcgttcgttcggaggtttttgtttcgagggcgtggaagggagggtttcgggggcgggggaggtgcgtatttttcgcgtcgcgtattttattcgcgtttgtcgcgttgttatttttagtagtttttgcgttatgggcgggttttacgagatagttttgtatcgggcgttcggttttttcgtttcgggttttggttttttcgtttcgggtttcggttacggatttttttggtttaagatttagggttcggatttggcgtttttaagcgtttcgggtttgggagtagcgtttagattttcgtcgtcgggttttgagaattcgtttttttaggttttttattagattttttttttttttcgtattttttgtttataacgaaattttcggggcgtattgttttcgggtatttttcgattttgggtaagtttcgtcgggcggggtgcggttggtttttcggggttttttgcgtagttcggcgatgtcggttagttcgtagtagcggggtttcgtattaacggggttttttgtttttttttttttttttaggatcgttacgacgggagtagtaatgggaattcgcgggttttttatttttttttcgtcgggtagtatttttatagtttcgcgttattttttttttatattggagtcgtcgaatattagtcgttattttattttttttttttttattagtagttggtttatttttagtcggtcgatttttattcgtatttgggggaagcgtacgtcgtcgttattaattttttgtattagtcggcgtttataggtagttagtagtaggtttggttcggtcgttagagttaggagggagcggggttgttttcgtattacgggcgttcggtcggtttattgttttattttttcgggttggaggcgggcgcggtgagcgttcgtagggatgtttatcgtcgtttcgatttgttgttgttttacgtatacgttttggatgtcgcgggtttggtcgagaatttggggttttacgatatgttttattagatggacgaggtgtaggtgagcggcgttgcggtttttgatcggatttgtttattttacggttttttgtttttatttcgtatttttttaggttttttcgaatttaagggaattttgtttttttttttttagaatgtcgacgattagtatttgttgttgta

SEQ ID NO: 32 - DNA, 6709 bp, Artificial Sequence
  chemically treated genomic DNA (Homo sapiens)
tgtagtaataggtgttggtcgtcgatattttgggggagagaggataaaatttttttaagttcgggggagtttagaggagtgcggggtgggggtagaaggtcgtagggtgaataggttcggttaggagtcgtagcgtcgtttatttgtatttcgtttatttggtgaggtatgtcgtggagttttaggttttcggttaggttcgcggtatttagggcgtgtgcgtggggtagtagtaggtcggagcggcggtaggtatttttgcgggcgtttatcgcgttcgtttttagttcggagaggtggggtagtaggtcggtcgggcgttcgtggtgcgagggtagtttcgtttttttttggttttggcggtcgggttaggtttgttgttggttgtttgtgggcgtcggttggtgtagggggttgatggcggcggcgtacgttttttttagatgcgagtaggggtcggtcgattgggagtaggttagttgttggtagggagggggaaagtagggtggcggttgatattcggcgattttagtgtgggagaggggtggcgcggggttgtagaggtgttgttcggcggaggagaggtgggggattcgcggatttttattgttgttttcgtcgtggcgattttggagggaaaaaaaaaaataggagatttcgttagtgcgaaatttcgttattgcgaattggtcggtatcgtcgggttacgtagagggtttcgggggattaatcgtatttcgttcggcggggtttgtttagggtcggaaggtattcgggggtaatgcgtttcgaggatttcgttgtaagtaaagagtgcggggagggaggagagtttggtgaaagatttgggggaacgagtttttaaagttcggcggcgaaggtttaggcgttgtttttaagttcgaggcgtttggaggcgttaagttcgaattttgggttttgggttagaaaagttcgtggtcggagttcggggcgaaggagttagagttcggggcgaaggagtcggacgttcggtgtagagttatttcgtggagttcgtttatgacgtagggattgttggaggtggtagcgcggtaggcgcggatagagtgcgcggcgcgggaaatgcgtatttttttcgttttcgggatttttttttttacgttttcgggataaagattttcgagcgggcggcgttcggaaagtagggttcgttattttgcgtcgttttgggaagtgaagagggagcgcgcgtatagggcggttttttttgttggtcgggtttagtcgaggggagtaataagtgggggcgttttgtattgttaagggtagtgttttcgtacgtcggggcgtagagggggtatgaagaattttggaaattgggtagttttgttcgcgtacgttttttcgtttttgggcggttcgatttagtttttaaaggatgcgtttttatttgtttaggggtttcggggcgtcgggaatttggaggaatatggcgttgtcgttttttggcggaagcgttcgggtttgcgggtaggggtagttttttagggttcggaggcgtagtgaattttcgcgagttcgtagttcgagtttcgcgttttcggcgtttttgagttcgtttagcgttgtttgcgtttttttttttttttcgttcgtcgtttttttttttttttttatttttcgaaattttagtttaatttgttcgataggttggagtattcgcgagtttttacggttttatttggtttcgggtatttttattattattttttagtttttattttttttgaaagttaaatttcggttgttttcgtgttttttcgaggaggtagcggggtaggtgataagtcggttttggaggagtgttcgttaaggtgtcgttagtaggtagttttatttgatttttttggatagagatttcgtgcgtaaaagttacgtttgagggttgtagacggggtattttttcgagaaaacgggaagtagggttgtttgtcgtttaggaaagcgttcggtaagttgtgtgggtgggatttgttattttttttttaggtttcgttttcgaggggaggttatttaggaaaaggttttatataggaaaggggtttcgtagaaatggattaaggggtgttcggagaagtggatttcgttttatcgagaggttagggtttttatgttttcgttttcgatttcggtttagtggtttttgtttttcggattgttttcggcggggcggggttgtatttcggagttttagtttatttcgtagtttttttcgtatttgatattatcggttattttttataatatggcgttcggcgttttttaaaatagtcgttagttaaatttaggatttttttagtttttaagcggtaaatttaaaatcggggttacggtgattaggcgtttgtcgtcgttttcgtcgcgcgcgggttttgttgttcgggttattggatacgtatcggcggttttgcgagcgtagatgttgtcgtcgcgagtgttaagatcgtttcgcggacggggaaagtcgcgttcgaatagtgtgttttggcgatagtcgggggattcgagcgttttaatgagaaggaaattattataattttttttcgggggtcggcgcggaggtttaggcgtcgggcggggcggtttttagttagttttagtttagtttcgtttcgtattcgggtttggcgtagcgtcgagttttacgttgtgagggacgaagcgcggagttagtgggcggtgtttcgttgatagtcgaagatttgcgaggtttgggtttttcgacgcgttttttttttgttatttttatcgtaaatatatttgagattggtagagttgggggaagggatttaaatattgaaatttatttttttttcgtttaaacggtttttattcgtttttttaaaagacggatgttatttggagttaagaaattgcgtatttggggagcgatttaataatcggggtttttttattttttaaaaatatattttattttatttatattttattgaggtttaaggtttgagttgggattatgtagttggagttttagtgcgttagagacgtttagtttttttcgtgggtatagcgcggtttcggttttcgggcgggaggagagaggaagggatttttggggagtttgttttaagggtcgtagaggtagtagacggttttattcgtttaggagttgcggatagcggcgtttcgtcgttgtcgttcgaagtggtatttttcgcggttggttgaggttagggggaattcgcgcgtattggattagtttagcggttcggttttgttttgttttgcggaacgtcggttttgtagttgtttttggcgggtcggttatttagaagtttttattcgttttgggaaagaagcgtcgggtaggaataaaattcgagcgttacgggtaaggtgagggtgaggaggtgtaggaagttgggagagagtttgtagagagttttcgattggagaggtagatatttaggttttatatgtttagatagaaaacgaaatttttttttatataaacgttgtttttttttttttttcggtatttgttatttaaatttgaaagtaaagtgtaatattaatttttaaaatttaaattaacgaaattttttggtttagttattatgtagtaattgatttttattgtaaggggaatatcgttaattttcgagggcgtatttgttgggacgttttaattggttttttgggttggatttaaatattttgtggggattagaggataagattatttttatttgatattgaatacgattttgtaataattaatgtttattagtacggtgttcgtatttgtagtagatatgatttttttatttacggaatggcggtatttattgtttcgttgttttttttcgggttcgtttgaattttagtatttatttagatttaggtgggtttaaaagaaaataataataataggcgttttttaagggaaattttttttcggttttagatagtagttaaattttaggtgatttttcgatcggacgcgggaataaaatttggaagttgaaattattgagatttttcggttaagtatatttgtagggttttgtattaaggagaatagtgtataaaaagatatataggattttgatatttcggttttaaaataggtttttgggggtaaaataagttatcgtagaagtagcgtttttggtattagcggcgggggagggggatatttgttagaagtagaaattagatttaggttcgtaggtattttagagtataggtttaggaagatgggttttagattcgttagaggtgcggcgtttttttcgggcgtttgggattttttgacgggtgtcgttgggttgttcgatattttgggttttttagttttcggttttattttttgattcggtttgaggtgtagtttgaataagttgttttgtttgtgttggtaagtttattttttgtacgttggggttcggaatgggtaagaaggtgtttattttttattttaggttttggttttttttttttatagtaatattagttaaagttgttcggaggaatcgatatgttttttcgtttgggagcgtttacgtaggaggcgaagggagtcgatgggtattgagggttcgcgtagtatcgtgtcgtgggtttaaaggatttagaggattcggaatcgtttggtaaaggttatttatttttaaggagtttttttggatttcggcgttgttttttttttaatgggtaagcgttcgaattggagcgtaattttcgcgttttttgtacggaaggtagttagaataaattttttgttttttcggtacgggagatttttttttaatacgtatattttcggtttttgggtcggtatttaggtacgcgcgcgtttttgtgaggaagttttaatttttttttgattttaatttttttgtttagtagagtcgggaatcgaaggttttagtatttaagatagtttttttttaacgttttcgttttttgtttacgtgaagacgcggattgcgtggtcgcgtttaagatagtcggtatcggtagaaggggatttttttggaatttcggaggtttcgtagtcgtttggagaagaggatggaaggttgtcgggggtttttttttatcgttttttagggagtttaaatttatttattttttggaagttttggatttacgtttttatgaaatcgtaaattaggtttttgtaatagcgggagcgttttaatagcgcgttatttttaaagaggcgcgaggtggtgtttttggaaatagggttttcggttttaggtttgagttattcgttatttttgtttttattttagacggaagaaggcggttaggcgggtagagtaagattcgggtagatttgcgattttttttttcgttttagggaggggattttcgagtagaagatggaggttttcgagcgttttcgtagatttcgcgttacgcgtcggacgtttgtttcgtttttcgggataacgtgagcgtcggtagggattttagtaagtggtagattcgttaggattaagtaaggtggaaaggtcggggtttgcggtaaatttaggaggagggggtatttacgttcgttatttttttttcgcggtattggtatttattggatcgatattggcgttaaagggtattttgaagtatttatgtttagtaagggtatgttttggggtattatagatattaagttatagttattttaaaataattataaaaatgattatcgtaaataatagattgttttaatagggcgcgaagcggtcgtcgtatatagacgtttttggttttagttttattagatttagtttattgttcgtttttttgcgtttcgcgttaggtcgtatgtttttcgtttagaattttttgagttttaatttttttttttaaataatttttttttttaaataggtaaagtgaggcgaggagttgaggggtttataggtttttaagttttcgaggagggttcgggtttacgttagtttcggttcgttaaacgagatttcgtgggtatagtttttaatttgataattatttgttttattttatagtaggtaaaagtgaatttttagtcgtttaattatttgaaagttataaaggtgtttagggttgaaggttatttttttagcggttttattagggagttcgttagagatatgtttgattttttttttgttttgtttcgggggggattttcgttcgtcggaggttttatacgtttggtcgtgggatggtagatttttgttatttttttattaatatttcggagtttattcgtacgtattttaatcgttcggagcgtaggttcgaggattaaggcggtagtttcgtgttttttgaggtttttttcgtttcgtgttttgggtcgttatatatttttcggttaagttcggcgtttttaatttagaatttggtcgtttttaggcgtggagtaggttattgttgttagacgttgcgcggattcgtttttttgcgttagtattgggcgataggtagttcgggtagtatttaggagttattttgtacggttttaggcgttcgttttatttagcgttatttttcgtttttcgtagcgagttttttcgtagttttttttttttgttagttttcggggtcgtatttgttttttatatagatatttttttttttattcgtaggaattggaagtttatggtgttagttttttaattttttgtgagttgaggagtttaagagt

SEQ ID NO: 33 - DNA, 2296 bp, Artificial Sequence
  chemically treated genomic DNA (Homo sapiens)
gttattgtattttgttaatattttttaaaagtaaaaaataaattaaaaaaaaagtttttagtggattgttgagttttttttgataggaggtattaaatgtgttttttttgaggataggggaagagtttattatttagttatatttttgtatattttataaaatttatttttattaaggatgtttttttataaaatgaggagtagtataaagaatatttaagaaattaggtttgatttagggtttttgatgttggggtaggtttttcgcgtgttaatattttaggggattttgttgtagttttttgaatatcggttgtgagttttttaattttagttgagttttagtattttttttatattatttattttttttgtttgtttttggcgcgtttagataattggaatttttgttgatattttaaatgggttggttatttttttagcgtggaggtatttagtataaggtgtgatagattagtatttgttgatgagtaataaagttattttggtaaattggattttttttttgaaacgttttggtttttatatttttaatgatgggttaagaaatagtttttaagaagaaggggcggagatagggggtaggattttgtttgaagtttttaagttgattttgtttgtagttatttaatttattagggagggttggatttgtttttttgtggtggatttttcgtatttttagaaagtgtaggggtggagaattaatttagttttttttttttttataagagtttcgttaggttagtttgtatgaggagggtacgtgtatatttttaaaaggattggtgtagttatttttttaagtttatagttttagtgtgagtttagggtttagattcggggtttttggtgttttaggcgtgagttaagttttttgagtaagaggttttatgataaattagttggagtttgggggttatgaaagtattggttatggtagaaattattagttcgttatcgtttatgttgttttgtttaaaaatgatatcgcgtaagggattttgttaatttttaatttcgggagattatttattatttggttgtggttcgtcgttgaataggaaagtatttcgagatgttaagagattaaaaggttcgtaattgttgtttagaaatgaaaatggttttaaattataattagagatggaagcgcgttttaggggagggcggggcgttgtgtaatcgagttttttatgcgtaaggcggatataaacggtttatggatgtgggcgaaggtttttagagtaaagaatgtttatttttattagattaaaatatagtttgggaaaataattatttgtttgagattttgggaaagtaaaattttttggtttttttgttaggaagaacgattgtaaaataagggttgagaattttttaaataagattttagaattttatttaaatagttgtagtttatttttgaggagttttagatttatttgggtttgatggatgttgtaatattaagtttgaggtttttttagtttggtgttaagagtgggttttaggggataaatagagaatagttgtttttttaatcggagtagaaaataaaatttttttttttttttatttttaatttttttgttttgttgtgaaattgttattgcgtttttgaggagtgattaaaattttagttatgattaatttaaagggtaggtttttaggtagggaagggaaaggggtttaaggtaaaaaaaaaaaaaaaaagttagttgaagtgagtttatggaggatttggggattataaaagttatgggatttgagttaattaaaattaatggaaaagtattaatatgtaatttaaaaaataataataaaataaagtagtaaggatatttttggtttgttttttgtttttatttttgagtttgtttgggaattttggagtagattttttgaagtatagtatgagtgtttaatggttgttttaatttatttttttgttttttatatataaagattttgtaatggagagtgggaatgaatggtttatttatttttgaatattttttgtgagttgggaatgcgtttagtaaggttgttggagtggagggaaaagaaaaggtgtttgagttttttagatatgggtagaaaaggagagaatttgagataggttgagagaaagttgtttcggttggtagtattgttagatttttagatatatcgtatattttagttttcgaaaaggttattttgagtttttttagggtttttggggtttttattttattttaaatatttggaattgtttgtgtttgttataata

SEQ ID NO: 34 - DNA, 2296 bp, Artificial Sequence
  chemically treated genomic DNA (Homo sapiens)
tattatagtaggtatagatagttttaaatatttgggatgagatgagagttttaggggttttagagggatttaggatggttttttcgggggttggaatgtacggtgtgtttgagaatttggtaatgttgttaatcggagtagtttttttttagtttgttttaaattttttttttttttgtttatgtttagagaatttagatatttttttttttttttttattttagtagttttattgagcgtatttttaatttataggaaatgtttaggggtgggtggattatttatttttattttttattgtagaatttttgtgtgtgaagggtaggaaaataggttaaaatagttattgggtatttatgttgtgttttaggaagtttgttttaagatttttaagtaggtttaagaatggaagtagagagtaagttagaaatatttttattgttttattttattattattttttaaattgtatgttggtgtttttttattaattttaattgatttaagttttatgatttttgtgatttttaaattttttataaatttattttaattgattttttttttttttttttgttttgaattttttttttttttttgtttgggaatttgttttttaaattggttatggttgggattttaattattttttaaaggcgtagtgataattttataataaagtagggaggttgggggtgggaaggggagggagttttgttttttatttcgattaagagagtaattgttttttgtttgttttttggggtttatttttggtattaggttggggagattttaaatttggtgttgtaatatttattagatttaagtgagtttggggttttttaaaggtgaattgtagttgtttggataaaattttaaaattttgtttgggagatttttagtttttgttttataatcgttttttttggtaaagaaattaggaagttttatttttttaggattttaggtaggtaattgtttttttaaattgtattttaatttgatggaaatggatattttttgttttgagaattttcgtttatatttataaatcgtttgtattcgttttgcgtatgggaggttcgattatatagcgtttcgtttttttttgagacgcgtttttatttttggttataatttagggttatttttatttttaaataatagttacgagttttttagttttttggtatttcggagtgtttttttgtttagcggcggattatagttaggtggtgggtgatttttcgaggttgggaattggtaaaattttttacgcggtgttatttttaagtaaagtagtataaacggtgacgagttggtagtttttgttataattaatgtttttatggtttttaggttttaattgatttattatgaggttttttgtttaggggatttggtttacgtttgaaatattagaggtttcgagtttgggttttgagtttatattgggattgtgagtttagggaagtggttgtattagtttttttggaggtgtgtacgtgttttttttatgtaggttgatttggcggggtttttatggggaggaggggggttgagttaattttttatttttgtattttttggagatgcggagagtttattatagggaggtagatttagttttttttagtgaattaagtgattgtaaatagagttagtttggaagttttaggtagggttttattttttattttcgttttttttttttgggggttgttttttgatttattattaaaaatgtaaaagttaaaacgttttaggggaaaagtttaatttgttagaataattttgttatttattaataaatattgatttattatattttgtgttaggtgtttttacgttggagaagtagttagtttatttaaaatgttagtaaagattttagttgtttaaacgcgttagggataggtaaggaggataagtggtgtgaggaggatgttgggatttagttgaagttggaaagtttatagtcggtatttagagaattgtaatagggttttttgggatattagtacgcggggaatttgttttagtattagaggttttgggttaggtttggttttttaggtgttttttgtgttattttttattttgtggagaggtatttttggtagaagtgaattttgtaaaatatgtaaaggtatggttgaatagtgaattttttttttgtttttaggaaaagtatatttggtattttttgttagaggggatttagtaatttattaaagattttttttttaatttattttttatttttgaaaaatgttggtagggtgtagtgat

SEQ ID NO: 35 - DNA, 4247 bp, Artificial Sequence
  chemically treated genomic DNA (Homo sapiens)
ttttaaaaaaattaaaatataaaataataataattattaaaaattttattttcgtttttttaaataaaaaatttattttaaaaattttaatttaaaaatttaaaaacgaaaaacgcgtattataatttttaaaaattttcgaatttaaaaacgattttcgtttttcgtttttttcgcgcgacgaaatcgaatttattaataaaaattcgaaataaaacgaataaaaacgaaacgaaacgaaattacgaaaaaataatcgacgaatcgcgtcgcgaattaatattttaaaaaacgcgaaattcgaataatcgcgcgttaaaaatttcgaaacgaacgtcgcgaaattttttcgaattataaataaacgattttacgacgcgattcgaataaaaattcgacgattttataaaaaaatttaaaatatcgacgtcgaattttttttaattttcgtaataatcgatacgttatataaaacgaaaaaaaattcgaaataaatttcgaaacgcgaattaaaaaaaacgaattcgattcgcgattttaacgtttttcgatcgacgcgaaaaaaataaaattaaacgttcgcgcgaatttcgaaaaaaaaaaaaataaaaaattttaacgattaaaaatttttcgaacgtttatttcgaaatttttttcgtcgttttttatttaaaatatatcgaattcgatacgattttatcgttttattttttattacgatttttatttcgaattaaatttaattaatttattataataattatcgataatcgttttttcgtttcgtaatatttcgtaaattttaaaatcgcgacgtcgtcgaatataaatttcgaatttaaaacgcgcgatttttttttttacgatcgtcgttttttaaaaaaaattacgcgaatataaaaaatttatttaatacgttttataaaatttattatttttttttcgatcgcgaattacgtcgataattcgaaaaattcgatttttcgttttttatttttttttttttttttttttttttttttttttttttattttttcgtttattcgtcgtaattttataaaaaaaaaatcgtttttttaattattttttttttttattttttatatatttttttattttttttcgatttataaaaaaaacgaaataacgattaaaaaacgttaaaaaaaaaaaataaaaacgtaaattacgaatttataaacgatattcgatttcgcgttcgacgaaaattacgaattaattcgaattcgcgtttcgttttttcgcgatatttaaaaatcgttcgaattaaaatcgcgttatttttcgtttaacgtcgacgtaataaaatttacgcgatataaaattttcgaaaatttaaaaaattttaaaacgttacgaatttaatatttttttatttataaaattttaaattaataaaaaatatttcgcgaattttaaaaaaaaataataaatattttttattttattcgaatttttttaataaaaatttatacgtacgataacgttattacgtttataaataacgttaaaatataaaaaaaataaaaaatcgaaattcgaaaattttatttcgtaataaaatttaaaatttaatttaaattttaaaaattcgtttaaaatttaaaatttaatataataaaaataaaaaaaattttcgataatttatttttataattaaaaaacgttaattaatatttttaaatttttatttcgtaaataaaataaaaatatacgaaattatttaaaaaatttttattattcgttattattaaatataatttaaatttcgtaaaaaaaaataattttattttaaaattaaaatttttaaaatattttaaaattcgataaaaaaaataaaaaaaataaaatttaaaaattaataattttatatttaatatttttcgtatttttttttttttttatattttttaataatttttataattttaattatttttaaattttatttttttcgtttttttttaaattaaaatattaaaattaaattataatttaaattatatttatattttattaaaaaataaaaattttaaatttatcgcgtttttttttattattaattttaatttaatatttaataaatttttttttttaaattattaaaataaattcgcgtaaattcgatttaatcgtcgttttcgaattatcgaataaatcgatcgtttcgtcgttttaaaaattatttttattttattttaatttaaatttaaaaaaatttaaattaataattttaatcgaaaaaacgaaacgacgtttattaattattattaaaattattattattattattataataattaacgtaatatttttaatcgataattttttataaaaaaaaatattattttttttttattatatttaaaataaataaaacgaataataaaaaaataaaaaaaaaaaaaaaaaaaaaaatatatatttttaataaatttttaaatttaaaaattatataattttatattaattattatttttttttaaataataaaaatttataaatttattacgtttattttatatttaaaaaattaatattttcgaaatatttattaaataacgaaatattttaaaaaaaaaataaaataaataaatttttaatttttttattaaatttaattataatttataaaaaaaattttttttttttttttatttttttttattaaaaatattaaatatattaaatttaatacgtttattttataaataaaaaaaaaaaaatataaaattaataattaatttaataaaaaatataattatataatattaaaattttttattttatttatttttttaatttatttttatttatttttaatttaatatttaataaaataaaaatttattaattttttcgtatttatttattatttaattttataattattttttaattttaattaaatttcgtaaaatattttaaatttatttttaataatttttaattatcgttcgattatttttatttttttatttttatatatttatttttatttcgttaaattaattaaattttaattaaaattaattttttatttttttaaataataaataataattttttaaataaaattttaataaatattaataaattttttttttttttttaaaattataaaaataatattttttatttaaaaataataaattttttaaatttttttcgatttaaattaaaaaaattaatttataaaatataaaaattatattttttttcgatttttttttttttttcgttattatttaattttttaattaatttttttttatttttaaatttaaatattttaataattaatataaatttatttttattaataaaataataaaaacgatatattaaaaaattatatatttatttaaaaaaaaaaaataaatttatattttttaaatataaataaaaaatttaaaatttttttatttttattaaaaaaaaaaaaatttttaatttttaaaaattaacgttttttaaaaattaaattattttaattttaaattttaattttattataaataaattttataattttaaataaattattaaatttttttaaattttaaatattatatttattatatttaaataattaaaaaaatttaataatataatattatataaaatatttaatttatattaattaaaatattaatttaaatcgataaaatatataatttaaaaataaataaatttataaaaatattttttattaaaaataataataaattaatatttttaatattaaaattttaaaatttaaaaattaaatttaatttaaataaaaattataaaattaaaaaaaaattaaatttataatataaaaaaaattttaaataatttttttatttaatattttatcgtattttttttttatttaataaaaaattaaattattaaaaatttaaatttattttttaacgtaattatttaatttatttcgattttttttttaataataaaataaaaaaatcgtaaaaaaatttttataaaataaattattattattaaaatttttttaatattattttttaattatataaaatttaaaaaataaattaaaaataaatttttttaaaaaaatataaaaattttttaaaaaaaaatttttaaaaattataaaaaaaaatttaaattataaaaatatataattttaaaaaaaaaaatataatattataaaaatattatttttttttaaaataatttttaaatttaaatata

SEQ ID NO: 36 - DNA, 4247 bp, Artificial Sequence
  chemically treated genomic DNA (Homo sapiens)
tgtatttaaatttagaaattattttgaggagaaataatatttttatagtattgtatttttttttttaggattatgtgtttttataatttaggtttttttttgtagtttttagaagtttttttttaaaaagtttttgtgtttttttggggaggtttatttttagtttgttttttgagttttgtgtagttagaaaatggtgttagaaaaattttgataatagtagtttattttataaaagtttttttgcgatttttttattttattgttgggaagagggtcgaggtaggttaggtggttgcgttagaagatgagtttgggtttttagtgatttagttttttattaagtagagagggggtgcggtagggtgttgggtaggaggattgtttgaggttttttttgtgttatgagtttgatttttttttaattttatagtttttgtttgagttaagtttaatttttagattttaaaattttagtattgaagatgttagtttgttattgtttttagtagaggatgtttttataggtttatttgtttttaagttatatgttttatcgatttaaattagtgttttggttggtgtgggttaggtattttatataatattgtattgttgaatttttttagttatttagatataatagatataatgtttgaggtttagagaggtttagtaatttgtttggggttatagagtttatttatggtagagttgggatttagaattagggtagtttgatttttgagagacgttgatttttgagagttagagatttttttttttttaatgggagtagggagattttaagttttttatttgtgtttagaggatgtaaatttgttttttttttttaagtagatgtgtagttttttagtatatcgtttttgttattttgttaataagagtaggtttgtgttgattgttaaggtatttaggtttagggatgggagggggttggttagagagttgggtagtagcggggagagggggagggtcgggaaggggtatggtttttatattttatgaattaatttttttggtttgggtcggggagggtttagaggatttattatttttgaataaggggtgttatttttataattttgaggaaggaggaaagatttgttgatatttattgagattttatttaaaaaattgttatttgttatttgagagagtagggggttagttttggttagggtttaattaatttggcgaagtaaaggtaggtatgtaaaggtaggaaggtgaaggtagtcgggcggtggttgagagttattgaagataaatttaagatgttttacggggtttagttaggattagaaggtagttatggggttaggtagtgggtggatgcggggaagttagtgggtttttgttttgttagatattaagttggaagtagatgaaagtgggttaagaggatagatggggtaaggggttttagtattgtatggttgtattttttattaagttggttattggttttgtatttttttttttttatttataagatgggcgtgttagatttaatgtgtttaatgtttttagtagaaaaaagtgagaagagaaaggaggttttttttataaattatagttaggtttagtgagaagattagaggtttgtttgttttgttttttttttaaggtatttcgttgtttagtaggtgtttcggaaatattagttttttgggtgtaggatgagcgtaatggatttatagatttttgttgtttagagaggggtagtgattagtataaggttatatagtttttaagtttaagggtttgttggaggtatatatttttttttttttttttttttttatttttttgttgttcgttttatttattttgggtgtgatgggaaggaagtgatatttttttttatgaaaagttatcgattgggaatattgcgttaattattataataatggtaatagtagttttaataataattagtagacgtcgtttcgttttttcggttgaggttgttggtttaagtttttttaagtttgagttggagtaaaataaagatagtttttgaagcggcgaaacggtcggtttattcggtagttcgggagcggcggttaggtcgagtttacgcgagtttgttttagtagtttggggaggggggtttgttaagtgttgagttggagttagtagtgagaagaaacgcgatgggtttgggatttttattttttaatagggtataggtgtagtttaagttatagtttaattttagtattttagtttgggggagggcgagagagatagggtttgggggtagttgaggttataagagttattagagggtatagaaagggaaggaggtgcgggggatattgaatgtgaggttattaatttttaagttttattttttttgttttttttatcgggttttgggatgttttaaaagttttagttttaggatgggattgtttttttttacggagtttgggttatatttggtggtgacggatagtgagagttttttagatggtttcgtgtgtttttattttatttacggggtagaggtttagaggtgttagttgacgttttttaattgtagaagtagattatcggaggttttttttatttttgttatattaagttttaggttttaggcgggtttttaaggtttggattgggttttgagttttgttgcggggtgaagttttcgagtttcgattttttattttttttgtgttttagcgttgtttgtaggcgtagtgacgttatcgtgcgtgtgggtttttattagaggagttcgggtggggtaagaggtatttgttgtttttttttggggttcgcggagtattttttattggtttaagattttgtaaataaagggatattggattcgtagcgttttgggattttttgggttttcgggggttttgtatcgcgtaagttttattacgtcggcgttgggcggagggtgacgcgattttagttcgggcgatttttagatatcgcggagggacggagcgcgggttcgggttggttcgtagttttcgtcgagcgcgaagtcgggtatcgtttgtaagttcgtagtttacgtttttgttttttttttttgacgttttttagtcgttatttcgttttttttgtagatcgagggaagataaggggatatataagggataggagaggagagtaattagggaagcgattttttttttgtggggttgcggcgggtgggcggagagataggagaggaaaagagaaaagggaagagaaggaaggggtagggggcgagaagtcgggtttttcggattatcggcgtagttcgcggtcgaaagaggaatagtggattttataaagcgtattgagtaagttttttatattcgcgtagttttttttaggaaacggcggtcgtagaggaaagggtcgcgcgttttggattcggagtttgtgttcggcggcgtcgcggttttgaaatttgcgggatgttacggggcggaggggcggttgtcgatagttgttataataaattagttgagtttagttcgaggtggaaatcgtagtaggaagtgggacgatagagtcgtatcgggttcggtatattttaggtaagagacggcgaaaagagtttcgagataaacgttcgggaagtttttggtcgttaaaattttttgtttttttttttttcgaagttcgcgcggacgtttagttttatttttttcgcgtcggtcggggagcgttgaagtcgcgggtcgggttcgttttttttggttcgcgtttcgaaatttatttcgggttttttttcgttttatatagcgtatcgattgttacgagggttggaggggattcggcgtcggtattttgaatttttttgtagggtcgtcgagtttttgttcgggtcgcgtcgtagagtcgtttatttatggttcggagaggtttcgcggcgttcgtttcgagatttttagcgcgcggttgttcggatttcgcgttttttgagatattggttcgcggcgcggttcgtcggttattttttcgtagtttcgtttcgtttcgtttttgttcgttttatttcgggtttttattggtaagttcggtttcgtcgcgcggagaaggcggggggcggggatcgtttttgagttcggggatttttgggaattgtagtgcgcgtttttcgtttttaggtttttagattggagtttttggaataggttttttatttagaggagcggaggtaggatttttagtaattattgttgttttgtgttttagtttttttggag

SEQ ID NO: 37 - DNA, 3905 bp, Artificial Sequence
  chemically treated genomic DNA (Homo sapiens)
tttaaaaaagtagatttgaagatgtttaaagtaataatggtgttgttagaatggtgtttttttttttttttaggggatgattttgaaggatattataataatagatgtgtaaattttgaaatatatggttaaaatgaggtttattattttttagttattatttagatattttttagttatttgtttatgatagtttataaatgagaaagaagtttatttaaaatatttttatgaggattttaaggtaaataataggaattgattatttattaatttggtttggttttggtttattgaagaaagtttttttttgagtgtatttaaagtttttatggtttagttttgtttaatttgagtagtattttatttgttttttttttagatgttttgatgttttgtattagatttaagagagagttaagttttttaataggttatgtatgtggttattaatatttagtatatgttatttttggttagtttttttttttttttttaagaattaaatattttttggtttgagttttttttttttatgttattataaagttgagttatttattattagggtttatatatgagtagttaaaatatatgggtttttatatttaggttaaggggtttttagtaggagaatatgaataattaggagtgaggttatgagatagaggaagaaaagtttataggaatgggaagatagttttttagatgagaggtgtgtggagtgattgttgtgaggaattgtttaataggaaagttagttaatttgaggatgtttttaggggaggaaaagggaaatttatatggttttttgttaatttttaaaaataaggtagatttttatttatttagggtgtttgtttgttatgaatataggaagattaaggaatgagtatggattgtttttattttatgtttttggataagaagaataataaaaaagtattgggtagttggaataattgtagaggttttaataatgatggagattttttggtgtattgtggtataggggttttttttaaagggatttaattaattttaataggtattattttttgtgatttaagatgttttttttaggagtgtttgtattttttaatgtttagagaagtttgtattattgatttgggaatattgagttttttagtttttgtaaaattatttttaggtttatttttaagtatattttttattttggggggttaaattttttggtttttagtgaatattgtggttatatttgtggttatttattgattttttatttgtttagtttatttgataataggtaaatggggaaagaggttttaatattttttaaaaggggaagattgataattagttatttattgtatagaattaggttaggttaattttttttaagaagaaaagtaatttggatattgtattttggggtttttttttattttggtattataggttttatgaggatgtagtttttttgtatttttttttttttttttaaattgttatttatttatttattttaattaggttaaagtattatatattgtagaagagaaagtaattttagttttttttaaatggtgttatttttatgatagtttgtaaattttggttttttatgggtttaggatttgtgtgtatttgtttggggatttgttggtggatttattttttatggtggagtagtaaggggattttttagaaaaagtaatgggtgaagtaattgaaagagtgatgtagaaagtaatagttagaaatggtggggatgtgagtggtttagataggaagggaggtggtggtgtagttttggtgtgtagtgtgttgtagtgatggaatttttgtaaaagttgtttgtttgtgtgttattagtggtgtgtaggtttgtggtttttttgtttttgtaattttgttttaattgttggtttattttttgataaataggatgtttttatttgaggttgttagtattttaggttttttgaaagaaaagaagtagagtggttttattttagaggtaaggatggggtttgtgttaagaggttttttagagaagtgaaaattttgtaggtgtagttgttgggagagtattaagaagggtagggtggaggggtagggggtgaagggagggggtgaagtttgtattttatttttatatgaaattgattttattattttatttttgtaagtgtttagaggtagagaggttaatattttggggatagtttggaggtgggagatttaggtagggttttttaaatttttatgtgtatgaaaattaggttaattatggggtttttgagtaaatggggatgatgatttagtaggtttgggttgaggttttagattttgtatttttaataagtttttaggtggtagtgatgttgttagtttaaagattatattgtgaatagtaaggtgttgttgggatagtttgttttagagtaaaatttaatagatgtgtaaatatttaaattaagttgtatttatttttgaggttttggtttaattggagttattttgttaatggaaaatggaaaatgaaatttttttaggttttaaagggaaggaaagtttgaaatggttaaggtatttaaaaaattttagttgggagtggttttggggatttgggagagttgaagttaggttttgagttaagagatgggggaggaagggtgggatgtggtaaataaatataaatatatatatataaattttagtttaattataggtttttttttattaatgaaatatttgtattttgtaggtagaatttatatgtgtttatattttttagaagttgaatggttttgtgtaatggtatagaatttggagtttatatttgaatattttagatttaatgttattttagattggttttaggattttgtggtttatatttaaaaatgtatgtttttgagttatgtttaattagtagtagtatttgagaattgagagattagattaagaaatttatggtatatgaataaaatttttagatagtagttagaatatagaggtttttttagaggtagtgttagttgttagttgtaaaaataggttttgtttagttttgtttaggtttgaagttttttgaagattttatttagattttattaaaattagttaaagattttttgttatagaaaggtttttaaagtatggttgggattatagggttattaagatgtagatttttgggtttttttgttttatttattatggttttttagggtgggtgttgggaatttgtattttaataaatgttttgaggatttttatgtattgttaagtttaggagtttttggtttgtaggtttaagtttaatttttttattgtagtatttaaagatttggttttaattttgttgtttataggtgagttttagtgatttttttattgttttttgagtatttttggagttatttggttgttttatttatttttttttttttgtttttttttagttttggaataaaatgatttttatttttttttttgaattttttttagattatggttttttatttagtaagtagttatttttttggtttgttattgttgtggtattaatgataggttatttgatttttattttgttgattgaatattttttatgtttaggttttgtttttttgattagatagtaagttttttgaagttattttatgttatataatttttatgtttaagattattttttaatgtagtgttatgtttatatggattatttagtaaatttattgatggtttatttattattaatatgttttatagagtgttattaagtagggatattttttatgggtttaggattagaagaagttgggaagagaaatggggtagtggtgagagtgttatgagaatttggttatatagttattaaagatatagaggaagtgggaaaaagggagtgt

SEQ ID NO: 38 - DNA, 3905 bp, Artificial Sequence
  chemically treated genomic DNA (Homo sapiens)
atatttttttttttttattttttttgtgtttttgatgattgtataattagatttttatgatatttttattattattttatttttttttttagttttttttgattttagatttatagagagtgtttttgtttaataatattttgtaaaatatgttggtgatagataagttattggtaaatttattgaatgatttatgtggatatgatattgtgttagaaagtagttttgaatataaagattatatagtatgaaatggttttagagaatttattgtttggttagggaggtaaagtttaagtatgagaaatatttagttaataaaatgagaattgagtggtttattattaatattatagtagtggtagattaggaaagtaattgtttgttgagtgggaagttatgatttgaagagagtttggagaggaagatggaagttattttattttagggttggggaaagatagaggagaagaaatgaatgaggtagttaggtggttttaggagtgtttagagggtagtgaggaagttattgaggtttgtttgtgaatagtaaaattgaagttaggtttttgaatgttgtagtgagaaggttgaatttaaatttgtagattagggatttttaaatttggtagtatataagaatttttaaagtgtttgttaaaatgtaggtttttggtatttattttgagaaattatgatgagtgaggtagagaggtttaagaatttgtattttaatagttttgtagttttagttatattttaagaatttttttgtaataggaagtttttgattggttttgatgaagtttaaatgaaatttttaggaaattttaggtttaagtaaaattgagtagaatttatttttatagttgataattggtattgtttttggagggatttttatgttttagttgttgtttggagattttatttatatattatggattttttagtttagttttttagtttttagatattattattaattaaatatgatttagaaatatgtatttttaaatgtaggttataagattttaaagttagtttgagataatattggatttagaatatttaaatatgggttttaaattttgtattattatataaaattatttaatttttgaaaaatgtggatatgtgtgagttttatttgtaagatgtaaatgttttattgataggaaagaatttgtggttgggttggggtttgtgtgtgtgtgtttatatttatttgttatattttatttttttttttttattttttggtttagaatttaattttaatttttttgaatttttaaggttatttttaattaggattttttaaatattttaattattttaaattttttttttttttggaatttaaaggaattttattttttattttttattagtaaggtggttttagttaaattagggttttaggaataaatatagtttggtttaaatatttgtatatttattaggttttattttaaagtagattgttttgatgatgttttgttatttatagtgtggtttttggattggtagtattattattatttgggaatttgttagaagtgtagaatttgaggttttagtttagatttgttgaattattgtttttatttgtttaagagttttgtgattggtttgatttttatgtatataaaagtttaaggagttttgtttaaattttttgtttttaagttgtttttgaaatgttggtttttttgtttttggatgtttgtagagatggggtagtggaattagttttatgtgggggtagggtgtgggttttattttttttttttgttttttgtttttttattttgttttttttgatgtttttttagtggttgtatttgtagagtttttatttttttgggaagttttttgatatagattttgtttttgtttttagggtggggttgttttatttttttttttttaaagagtttgggatgttgatagttttagatggaggtattttgtttgttgaaaaataaattggtagttaaagtagggttgtgagagtgagaaaattataggtttgtgtgttgttgataatgtgtgggtaggtagtttttgtagaagttttgttgttgtggtgtgttgtgtattagagttgtgttattgtttttttttttgtttgggttgtttgtgtttttgttgtttttggttgttgttttttgtgttgtttttttagttattttgtttattgttttttttaaaggatttttttgttgttttgttatgagggatggatttattaataagtttttgggtggatgtgtgtagattttggatttataggaggttaaaatttatgagttgttatgaaaatgatattgtttaagagaagttgaagttgtttttttttttgtagtatgtaatgttttgatttggttaaaataaataaataaataataatttaaaaagaaagaaagaaatatagaaagattatatttttatgaggtttgtaatgttaaaatgaaaagggattttaaagtgtaatatttagattgtttttttttttggagagagttgatttggtttgattttatgtggtgaataattaattattaattttttttttttgaggggtattaaagtttttttttttatttgtttgttattagataagttaggtagatgagaagttagtgggtaattataggtataattatgatatttattggaaattaaaagatttgattttttgaggtaaagaatgtatttgaaaataaatttgaaaatagttttataggagttgaaaaatttagtgtttttgaattagtaatatgaatttttttgagtattaaaaagtataagtatttttaaaaaggatattttgagttatagaagatgatgtttgttggggttgattgagtttttttggaagagatttttgtgttatggtgtattagaaagtttttattattgttggggtttttgtagttgttttagttatttagtgtttttttattattttttttgtttgaaaatatagagtagaaatagtttatatttattttttaatttttttgtgtttataatgagtaagtattttagatgagtaagaatttattttatttttaagaattagtagagaattatatgagttttttttttttttttttagaaatgtttttaggttggttaatttttttattgagtaattttttatagtaattattttgtatattttttatttgagaggttgtttttttatttttatgagtttttttttttttgttttatggttttatttttaattatttatgtttttttgttgaaggttttttgatttaaatatagagatttgtatattttggttatttatgtatagattttaataatgaataatttaattttatggtgatataaaggaggaaaatttaggttaaagaatgtttaatttttagggaagaaggagagagttggttagggatagtgtgtgttgggtgttaatagttatgtgtatagtttgttggggaatttggtttttttttgaatttggtgtagggtattggaatgtttgggggaggagtagataggatgttgtttaggttgaatagggttggattatgagagttttgaatgtatttaagaaggaattttttttagtgggttggggttaggttagattgatgaatgattgatttttattatttattttgaggtttttatggagatattttaaatggattttttttttatttataaattgttataaataaatgattaaaagatgtttaagtggtgattagaaaataataaattttattttagttatatattttagaatttatatatttgttattgtagtgttttttaaagttattttttgggagggagagggagtattattttaatagtattattattattttaaatatttttggatttgtttttttgaa

SEQ ID NO: 39 - DNA, 5338 bp, Artificial Sequence
  chemically treated genomic DNA (Homo sapiens)
ggtaattttttttgttattattttttgtataaaatatgtaagatgtttttattttattagtattgaaattaaagattaaaagagagaaaggtgttggattgaaaaggaggtggtgtaatggttattttttttagtattttggttttgttttttttggggaaggtggttatatttttatttgttttgtttttgaatgtagtaaataattttataaataattattgttgtttatgttttttatttgtttttttggttttattagatttttgtttttttgtattttttgggtagggtttttaataagtttaggttgaaagaatgtttgttattttttttatttttgttgaaagaaaaggaagaaaaatagtagtagtgagaaatttttggggtgattttttttttgtttttaagtattagtgtatagtatttttttttgtttttgttgtggttttttgttgttttgggttatgttgtttagttaagtaatttggatttgagagtgtatagttaggattagtttagggggtgaggggttggtttttgggaaattaagtgtttaggatagaggtggaaagtgggttttgggagttagaaaagagagagaagggtagatggttgggtggtaaatataaaaatagaaataatttagggggatgtttgttaggtttttgtgtttgtttttttttttttaatttggagtaggttttttttggttttttgtgttttggggtgttttttggtggtagtggtagtagtgggtaatgtgtggagggtttagggggtgtataggggatttttgggtatatttagagaggtgggtgtggttttttggtggtggtgatgtagttatttggtgagtggagttttgtttttttggtttggtgggtttatggttgttttattaagtattgtggttgagtagggtaggaagttgtttttggaatgtggtgttgttgtgttgtagttgaagtttgagttttttttggttttggtgtttttgttgttgttgttattattattattgttgttgttattgttattttgggaatttagggttgtggtagttgttgttgtggttgttgttgttgattgattgttgtggtaattgaggtatgagtagggtgtagagttgttgttggggggtgtgttggttgttgttgttgaggaggttgtagttgttgtggttgttgtggttgttgtggtagaggttgtgttgttgagttttgtggtggttgtgggagtttggtagagattagggtggtggaagttatatagtagttttggttgagagtaggggtgtgagagggtgtggaaggtgtttagtggttggatggaagtagtgaagggtgatgaagttgtggttgttgtgtttgaggttgtagttgtggttgttgttgttgtgatgtttatgtgtgggtagtagtgtagtggtatgtgtgagtggaaggggtagggtaggtttttggtggtggttgtgtgtgttattatgtaggtgtagaagttggggttggttgggtgtggttaggatatggttaggtgttgttgtttgttttttatgtgttggttttggaattatatttgtggggagagatgtgttgtagtttgggttagggagtgttttgtgtttttagtttttgttttaggatttttgttttttttggatttttgaatggtttggtttatttttttttgattaagtttaattttgagtattttgtggttttttagttgggaaagtgtggatggtagtgtgtggattgttgtgggtatattgtttttaatgaagagggtttttttttttgtgtttggttgttgttgttttttaggtttttatttttttattttttgttgtatttttttgttttaatttaatttttttttttttttttgttatttattagtgttggttttgttgagtatttgttttttaattttaggatttgtatggggattttgggtagtttttgaagagaggttgttgtttagtttttttgagaggttgttgtgtgaagttttgagttttttgaattgtaaggatttgtttttaggggtatgggtttgattttgatattgaagggatgattttgttggaattgtttgttttaaatgagtgggtagagtaatgtttttataaatggggaaggggatgtttttattttttttaatattatttaataaagatattatttgttataattttaaattaaagaaagtttgattaaattagagggagatttttatattttttttttattttgtggagatttttttttttttttgtagtgttgaatgttttatgaagggtttattaaattgtttaattttttggttattttttttagatgtataataaaattaataatttaaagttatatataaataaggataattttgttgtatttttttttgtaggaggttgttttttttttgttgtttaagaggaaaatgtttaggaaattattgttttaaattaattgattttaaagatatagtatttttttttttgtgtaatgatttatgtggaaaataaatttttaagtttaagagtaaatgaaaagttttatttttggtttttgtttgaggaataaagattaattgggtttgttgtttaggggaaagtggggttgtgggtatgggtgagggggtatttggttaggtgttgggtataatggagtaggggtgagtgtttttagtattggagttattatttgggggtttttttagatttgttaggttggataattgtttggatttggtggttgggaaataaataagttaatttttttggtgattattttttgtggatttttagatttttagttaaatttagttatttagaaaggggaaaggggaaaaagaaataattaatttagatgtttttggggaggttagagtaggtatgtattggaattgatattttgatggtggttttgggtaggttgagtgttgtggttagtttgtattggtggggttgtgatatatagtttttttggtagaattttttttttaggtgtgtgatttgtttgtgggtgaatgttgtatggtagtgttgtatttgatttgtgttagagttggagttatttagtgttgtgtttttgttgttgtttttgttgtttttatgtaggtttttgaggtttgagtttgatgttgatgttgtggtgttggtagttgagttgttttttgtgtattttggtaaataaatgattaatagtgtatgagtggttgtaggattaatagtttggtgttggtgttgtgtgtggattggggaagttttgttaggaaggagagttgttgttggaattgatggggtttgttatgtttataaattgttgttgttaatggaattaataaagtttggggagttttttataagtaaataatagaaatggaattaggagattttttttttaataattagaaatttttaattaaggaggaaaagtggttgagggaaaatgtttatttttgggtgtagtttgggaagttttgggttttttatggtttggagattgtagggtagttttttatatggtttttaatttttatttgagtttttggggttttaaatattttaagagttttaatatagtagtagtttaaatttaagttaatagggggtgaaatatattttttaatttttttttttgttgatttaaatagagatgttggtgaggttttttttgatttatttagaagaatgttttttttagttttgagggtataggggtaggggagtttagagtagttgtttagggtattttttttaaaagtaatttggttgttgattaggggtttattggtttgtttgggtttttagatatgagtgtagaaatatttttttggatttaggagtgagggtgggtgggtttggtgttttaggttttgtaggtttgagtttggtgggaaagtttaaggagtagaattggaaggtatggttttagatatgtgttttgtttttgtttgtgttagtttggtgtagtttgtttgtggagggtttgagaggggaaaaggtattgggaaaggttggtgggggttgtggaggagtaaagaggatgggattggagagtgtggtgtggttggtgtggttatttttgttattgttttttttaagttgagtggtgttgaggtttttgggggagtgaagtgtggagtagtttatttttatgttgttgtttatgttggttttagtggttgtttttgaataatggtttggttttttgtggtttttggtggtggaggagattttggaggagatggtgtttttgttgtttgtgtgttgtaggttgaataaagtgtttattttgaatttgtttttggtggggagtttttttagagtgttgtgtaggggggtagatggtaggtgtgggtttaggtgagttgggtgttgtgaattttttagggttttgagtatagtattgttagttgagttggataaattggagaattttttgtttgttgtagggttgtgtagttttttttttattagaattatttttttttttattttttttattattttagtttttttaaaaatgttatagtggttttgttgttttgttttaatgataggttgtgtttagggttaatttttatttagttttagtgaatgtttttaaatattattattgtttttggagggaggtggaaaaattgtgggatgttagagtgagggaatgattggttaaaatgatttatatatttttttgattttgagatgttatttattaaaaagtagtgtttgtttgttattaaggtatgaatgatgttgtttgaataattatttattgtaataggtttataagtaaataaatatatttttttgttagtgggtaatgaaggtagttttagagtagataaatagatttaggtaggaggtgagaagagataagtgaggaggaaggttttggttttttgtttgttttgagttagttttgtttgtttgggggtttggttttgggggtgaaattgatagtttgattaatagagtgtgttgtggtatatttttttttttatttaggggtattattatgtttttagtttgttaggttgttttttaggttttaattatgtagtgttttttttatttttttttggatatagatatgtattaaataatagataatggtttgattttttagagtaggtttttgggaaggtttggtttttttttttttttttttttttttttttattatttataagttgggggtataagtggggggagataagggggaggatgtaggaagagttgtgtaaggagaagattttgtgttttttttatttggattatttattttttggattttggaattaaatatgtattttatttaataaatag

SEQ ID NO: 40 - DNA, 5338 bp, Artificial Sequence
  chemically treated genomic DNA (Homo sapiens)
ttatttgttaaataaaatatatatttggttttgaaatttgaaagataagtaatttagataggagaggtgtaaggttttttttttatgtaattttttttgtatttttttttttatttttttttatttatgtttttagtttgtaaatggtaaaaaaaaaaaaaaaaaaaaaaaaaaaaattaaatttttttgaggatttattttggaaagttaaattattatttattatttaatatgtatttgtgtttaaggaaaaatgaagaaggtgttgtatgattaggatttaaggggtaatttagtaaattgagagtgtaatgatgtttttaaatgaagggggaaatgtgttgtggtgtgttttattaattagattgttaattttatttttgaggttaaatttttgggtgagtagaattggtttggagtgggtaaaggattggagtttttttttttatttgtttttttttgttttttatttggatttatttgtttgttttgaagttgtttttattatttattgataggagggtgtatttatttgtttataaatttgttataataaatgattatttgaatagtgttatttgtattttaatgatgagtgggtgttattttttgatgaatgatattttgggattggaaggatgtatgggttattttgattagttatttttttgttttggtattttataatttttttgtttttttttgaaagtgataataatatttagaggtgtttgttggggttgaatgagaattagttttaggtgtagtttattattaggatgggatagtagggttattgtgatatttttaagaaagttgagatgatggaaagaataagaaaagagatgattttgatggagagagggttgtatagttttatggtgggtaagagattttttaatttgtttaatttggttggtaatgttgtgtttgaggttttggaaaatttgtagtatttggtttgtttaagtttgtgtttgttgtttgtttttttgtatagtgttttgggagaattttttgttaagggtaaatttgaaatagatattttgtttaatttgtagtatatgggtagtgaaagtattgttttttttgaaattttttttgttgttgagagttgtaagaagttgggttattatttagaggtggttgttgaggttgatatgagtagtgatgtggaggtgggttgttttgtgttttgtttttttgggggttttggtgttgtttagtttaaggaaaataatggtaaaggtaattgtgttggttgtattgtgttttttagttttattttttttgtttttttgtggtttttgttagttttttttggtgttttttttttttttagattttttataggtaagttatattgagttagtatgggtgggggtgggatgtatgtttgggattgtgttttttagttttgttttttgagtttttttgttaggtttaggtttgtggagtttggaatattaggtttatttgtttttgtttttgagtttgagaaaatgtttttgtgtttgtgtttaagagtttgagtgagttggtagatttttagttagtagttgagttgtttttgggaaaggtattttgggtaattattttgaatttttttgtttttgtgtttttagggttggagggggtatttttttgggtaagttggaggaagttttgttggtgtttttgtttaggttagtgggagaaagagttgaaaagtatattttattttttattggtttgggtttgagttattgttgtgttggaatttttaaaatatttgaaattttgaagatttagataaaggttagaggttgtataaaaagttgttttgtggtttttagattatgggaaatttagagttttttaaattgtgtttagaggtaggtatttttttttggttattttttttttttggttgaaaatttttaattattaaaaaagaaattttttaattttgtttttattatttgtttatgaagggttttttaaattttattgattttattaatggtagtaatttgtaagtatgatagattttattaattttggtagtgatttttttttttgatggggtttttttgatttgtgtgtagtgttagtgttgggttgttggttttatagttatttatgtgttgttggttgtttgtttgttagggtatgtagagagtggtttggttgttggtattatgatgttggtgttgggtttaggttttggaagtttgtatggaggtagtggaggtagtggtgggagtgtggtgttgggtggttttggttttggtgtggattaagtgtggtgttattgtatggtgtttatttgtgagtagattgtgtgtttggagaaggagttttattgggagaattatgtgttgtggttttgttggtgtgagttggttgtggtatttaatttgtttgaaattattattaaggtattaattttagtgtatgtttgttttggtttttttgggggtatttgggttgattgtttttttttttttttttttttttttgggtggttagatttagttaagggtttggaaatttgtggggggtagttattaaaggaattggtttatttattttttggttattgaatttgaatggttgtttggtttgatggatttaagaaggtttttgaatggtgattttaatgttgaaagtatttgtttttgttttattgtgtttaatgtttggttagatgtttttttgtttatatttatggttttatttttttttaggtggtaagtttagttggtttttgttttttaagtaggaattagaggtgaaattttttatttgtttttgagtttggagatttattttttgtataaattgttatatggagaaaaggatattgtatttttaaaattgattggtttgagatagtagttttttgaatattttttttttgggtaatgaaaaaagggtaattttttgtggggaaaaatgtaatgaaattgtttttatttatatataattttaggttattaattttattatatgtttgggagagatagttgggaggttaggtgatttggtgagttttttatggagtgtttgatattgtagaaaaaagaaaaaatttttatggggtaggggaggagtgtggaagtttttttttggtttgattgggttttttttaatttagagttgtgatgaatgatgtttttattagatagtgttgggaggggtggaaatgtttttttttttgtttatggagatattgttttatttatttatttaaggtaaatgattttaataaaattatttttttaatattaaaattggatttgtgtttttaggggtaggtttttgtagtttggagggtttaagattttgtgtggtgattttttagaaaagttgagtggtagtttttttttaaaggttgtttagaatttttgtataaattttgggattgagagatgggtgtttagtgagattggtattggtgggtggtgggagggagaggaaaggttggattgggataaaaaagtgtagtaagaagtaagggaataaaagtttgaggagtagtagtagttggatgtgggggagaggattttttttgttgaggatggtgtgtttatggtggtttatatattgttgtttatatttttttagttgggagattatagggtatttggggttgggtttggttggagagaagtagattaagttatttagaggtttggaaggggtagaggttttgggataggagttgggaatatggggtgttttttaatttaggttgtggtgtgtttttttttgtaggtgtggttttagaattggtgtatgaaggataagtggtagtgtttggttatgttttggttgtatttagttgattttagtttttatatttatatgatgatgtatgtggttgttattggaagtttgttttattttttttatttgtatgtgttgttgtattattatttgtatgtgggtgttatggtggtggtggttgtggttgtagttttaggtgtggtggttgtggttttgttgttttttgttatttttatttggttattggatattttttgtgtttttttgtatttttatttttggttggagttgttgtgtagtttttgttattttggtttttattaggtttttgtggttgttgtggggtttaatagtgtggtttttgttgtggtagttgtggtagttgtagtggttgtggtttttttggtggtggtggttggtgtgttttttagtggtggttttgtattttgtttgtgttttagttgttatagtagttagttggtggtggtagttgtggtagtagttgttgtagttttgggtttttggggtggtggtggtggtggtggtggtggtggtggtggtggtggtgggggtgttggggttgggggaggtttggattttggttgtagtgtggtggtgttgtgttttgagagtggttttttgttttatttggttgtggtgtttagtaagatggttgtgagtttgttggattagagggatgaggttttgtttattagataattatgttgttattgttagggggttgtgtttgtttttttgagtgtgtttgggagttttttgtgtgttttttgagttttttgtgtgttgtttgttgttgttgttgttgttagggggtgttttggggtgtgggaggttgaagggaatttgttttgaattgggggagaaggagtaggtgtaaaagtttggtgggtatttttttaaattatttttatttttgtatttgttatttagttgtttgttttttttttttttttttggtttttgggatttattttttatttttgttttgagtgtttggttttttaaagattaattttttgttttttaagttagttttggttgtgtatttttaggtttgggttgtttggttgaatggtgtggtttgaagtaatggagaattataataaagatagagggggatgttgtgtgttggtgtttgggggtgggggaggagttgttttggaggttttttgttgttgttgtttttttttttttttttttaatgagggtgggggaggtggtaaatgtttttttagtttgagtttattagggattttgtttgaagagtgtgggagaatggaggtttgataaggttgggaggatggatggagagtgtgggtagtggtggttgtttgtgagattgtttattatgtttaggagtaaggtgggtagggatgtggttgttttttttgggaaggataaagttgaggtgttggaaggggtggttgttgtgttgttttttttttggtttaatattttttttttttttggtttttggttttagtgttgatggaatggaagtattttgtatattttatgtaaaaagtgatggtaaaagaggttgtt

SEQ ID NO: 41 - DNA, 5332 bp, Artificial Sequence
  chemically treated genomic DNA (Homo sapiens)
ttagttttaaattttgtatttgtattttttagataggaagttttttttttttgattagggattgagggagaagagatttagaatgtatttttttgttttaggttttttgggggggatatggttttagatagttattttgaaattgggtttaggtttttatagtaagttgagtgtttttttatatttttaattttggtttttttattaaagtttaaaagatttttttgttttttaggttttttttgtttggttgtttttattattttttaattgtggaaatattagttattatatgtttgttggagaataagtgtgagtgttgtggtggatagttgttgttaaaggtgtttagatggatggtatttttaaagtagggattttagtattttttttatatattattatttaagaatggtagaggaaagagtaggagtggggttatagataggagagaaaggaggttgaggttataaaattggtatttttttaattattaatttttttttttattattttgttattatttgttatggtaaagttttttttttgtgttttttttttaataaagaaatttttagttagtttttatttattttttttgatttgtaggaagttaaattgttagtagattgagttttttaagggatatttttgggatatgttggaattttgatttgtttaagatgatgatggttattagtataaattagaaataatgttattttttagggtgttatttgtaagtgtaataatatggatttatttgtaaaatttagttaaattgtgtttggataagtgattagatttaaatgataaattttttttattatttagttttttttaagttttgtgggggtagtatagaagattgttttagggtgaaattaaggtttagtttattatttgtgttagtttgagggattttggaaatgttgattttgagaaaaagataaaataaaataaaataaaataaaatttaattataaaatatattttattgtttataaagtaaatagaaatataaagttgtttttaaaattatttttttagtaaataagtatgtgatattttgagtaggagtaggagggagagaaagattgttatttaaaaaaatatgaaagtattaagtaataatttaaaatatggttgtttagaaaaatatttatatttattgtagttgtttaattggttttgttaaagttggtaagtatttaaattgtgttataattttatttaaattttgttttgttttagtaggttgaagagtttgaatagattaattattttataatgatgatgaatgagaaattaatttagatataagtaagataatttaggtttttatttgtttaaatagttttttaatattatttgttattgtgggttatagattgaattaattgtttaattttgtgaaagttatatttttgtgtttttattgagattatttatagtgtagtgagtgttgttgaaaggtatatgttgttaatagggataattatttaaagggaagtgtttgtaaaatggaaaataaatgttggggttggtaataaatgggattaaaagtagttattttaatttggttttttgagggaaaggagtgggtgtggttttgtaggattaggggtgtttttgatttttttaagatttaggtgaggttgagggtttttggtgtgttagtttgtgttgtggttgtggttgtggtggtgatttgggttgggttttgtttttgttggttttaggtttttgttttttttgtgtaggtagtgggtgtgtgtggtttgggttgggtaagttgaggaatagtgagtttttggatgttgattgtaggatgttttagtttgtgtttgggtttttgtttttttttgtatggggtttgtatttttgggtttgggtttgatttatagggtgttgaggtttttgtagttgaagttggaaggttttgttgtgagtgtggtataggttgttggtagtttttggattttggaggtttggttttttttttaagttgatggtggggaaagaattttgtttttatagtttttttgatttttgttgtttgttatttggggatgggaagtgtgtttgggttgttttatgtttttttgggttggagttttttttatggttggtttttttgggggtttttgggtttgtgagtagtgtttattttttttagagaagaatttttttttttttttattgaagtgtttttttttgtattttgaaataattttttttgggtgaggttagtttttttttgttgttttttttttgtaggtgtttgggagttttgtgaggattttgtgtagttgagtttaggtgataggtgtttttttaggtgtttatttgtttttttttaatttgtttagggaaagattagaatgatgtgtgtggggaggtggttttgttttttttgaaattggtgtttttgggtaaaattgtgtgttgtgtttatgtgggttttgttagtgtgtgtgttttagaagagtgggttttttaggtggtattttttggagaagtaagtgaggtgaatttagaatagagaagtgggaatgattgtttgatgtgttgagttggaaaaagagaggagagggagaggtttttagtgagtgtggagatagaggagtttatgtggtatagtatgagttttatttttgtttgtgtagaggtgtgtgtgtgtgtgtgtgtgtgtgtgtgtgtgtgtgtgtgtgtgtgtttttttttgtatttttgtgtttgaaataaaagtttaattaatggatttttggtgttttgaggatttatttttgggagtgattttgatgtattgttgtttaattagtgtttttaattggtgtttttggagataggtaggtttggagttgggatagagtttttttttgttttttttgtatattggaaaggtaaaatttataatatattgtggttattttttgggagagtgaaagagagtgggaggtagggaagaaagggagagatgtagttgtttgtagaggatggagtttttagttttgggggttgtggggaagggtttagattattgggtttgatttagttttttgtgtaagagggtttgggttggttgagttgttgaggattatgaatttgtttgtagaaaggtttagggagtttttattgtttgtataaatttattttatgtggtttattattttgttaataatggttgtttgttaataaggatgtggaggttaaataatttgggtggaagattaaatatgttttattaaggtgtttggaagttgtgtggtgtagagatttgtgttggagttgtttggtttattggagtttggagggagatgggagtatagtttgtaaggagttttggggtagaagaggaggtaaggtttagtttttttttttagggtgttttgttatgttaggataggtttaatttttttatatgttaaatagaaaatttatatagaagttagttttaatgaggtgtggaggttaaatttttggagtagttggttggagggtagatatggagtatttggggtttgaattaaaggtttttttttgaggaggggtggttattttttgttttttagtttttatatgttatgtatttggtaatttgtgtttatatgggattagtattggattagaagatagaagatgtggtttttagtttgggttttgtttttaaattattgtagaatttttattatattatttttttagttttatttttttattgtgtaagagaaaggagatggggtttgatgtagatgatgtatagtatttttttttttgtttagttttttattagagttagggaattgaatattttataagatgttttgttttttttaaattttgtaggatgtagttaaaaagaattttatttagtaaatatttgagggtttattttgtattagttatggtgtagtatgtattttttaattgagagtagaatattagtttatatttttttgttatttttaaatataatgttttataataaaagatgaaagagaaagaattttaaagagaatagaataggatgggtatgtatgtatagggtagagaaattatggaggtaaaggtaaaggtattgataaaagttgtgaagaatttgttgaattggtaaggaagttagtggataaatattgtagaagtagttttttaatagagatattatgtaggagagtagagagaaggtttttttttgaattttggtgatttggtagagaataaaagggtaagggttgtagaatttgattaggaggtttaagttgtatgtatttaatattgttaatttttggtttatatatttttttagtagttggaatttttttttttttttttttttttttttttttttttgagatggggttttgttttgttgtttaggttggagtgtagtggttttattaaggtttattgtagttttaaatttttaggtttaagtgatttttttattttagttttttgagtagtaagggttataggtatatgttattatgtttggataatttttttttttggttgaggggtatagatggggttttgttgtgttatttaggttggttttaagtttttaggtttaatgaatttttttattttggtgttttaaagtgttgagattataggaatgagttattgtgtttggtttaggaagtttattttttagttaattttgaaatattattttttgaatttattaattaggaaatttggttgttaggttgggattttttaagtttttgggtgatgggtatttagttttaaggaaggtaatgatgtttaaattattaaattatgttttagtttttgtgagttaggaatttagtgagtttagttgtgtgtttttggttttaggttattttattggggttgtggttttatttaaagatttagttgggtgaggatatgttttgggtttatttatgtggttgtttggtaggatttagttttttgttggtgggttatttggttgaaggttttagtttttttttggtggttggttagaggtttttttgttttttattatatgagtttttttatagggtagtttataaagtggtagttgtttttttttagattgagtaagtaagagtgagagtggaggggggagaaagtatttaagatagaagttatatttttttggttatttaattttggaagtgattttttattattatgttatattatatttgttagaagtgagttattagatttagtttatattaaaggaaaggggattatagaaggtattaaatttaggaggtagggattattggggattgttttagaggttgttgtttagattttttttatataatagttttgaggtttatatggt

SEQ ID NO: 42 - DNA, 5332 bp, Artificial Sequence
  chemically treated genomic DNA (Homo sapiens)
attatataagttttagagttgttatataaaaggggtttgggtagtagtttttaagatagtttttagtgatttttgttttttggatttgatgttttttgtaatttttttttttttagtgtgggttggatttagtgatttatttttaataaatataatatggtatagtgatggaaagttatttttaagattagatgattaaaagagtgtagtttttgttttgggtgtttttttttttttttatttttatttttgtttatttagtttgaggaaagatagttgttattttataagttattttatagagaggtttatatggtaaggaatagagaaatttttggttaattattaagaaggaattgaggtttttagttaaatagtttattagtaaggaattgaattttgttaaataattatatgagtgagtttggaatatatttttatttagttgagtttttagataagattataattttagtggaatagtttggagttagggatatatagttaagtttattagatttttgatttatagaaattgagatatggtttagtgatttaagtattattgttttttttgaggttaaatgtttattatttagaagtttgaagagttttagtttagtagttgagttttttgattggtggatttagaaagtaatgttttaaaattagttaaagagtaaattttttaggttgggtatagtggtttatttttgtaattttaatattttgggatattagggtgggagggtttattgagtttagaagtttgagattagtttgggtaatatagtaagattttatttgtattttttaattaaaaaaaaaaattatttaggtatggtggtatatgtttgtggtttttgttatttgggagattgagatgagaggattatttgagtttgggagtttaaggttgtagtgagttttgatggggttattgtattttagtttgagtaatagagtaagattttattttaaaaagaaaaagagagagagagagagagagagaaattttaattattgaaagaatatataaattaaaaattggtaatattagatgtatataatttgggttttttagttaaattttgtaatttttatttttttgttttttgttaaattattaggatttaggaggggattttttttttatttttttatatagtatttttgttaaggagttatttttgtagtatttatttattgatttttttgttagtttaataagttttttatagtttttgttaatgtttttatttttatttttatagtttttttattttgtatatatatatttattttattttattttttttgaagtttttttttttttattttttgttataaaatattatatttgagaataataggggaatatgaattgatattttgtttttagttaaaaaatatatattgtattatgattggtgtagagtaggtttttagatatttgttaaataaaattttttttgattgtattttgtaaggtttaggggagatagagtattttataaggtgtttagttttttaattttggtgggaagttggataaaagaagaaatgttgtatattatttatattaagttttatttttttttttttatatagtagaaaaatgaagttgggagaataatgtaataaaaattttatagtgatttaggggtagaatttagattagaaattatattttttgttttttaatttaatgttaattttatgtaggtataaattgttagatgtatgatatgtaaggattgggaggtaggggatggttatttttttttaaaagggggtttttggtttagattttagatgttttatgtttgttttttagttaattattttgagggtttgatttttatattttattggggttgatttttatgtggattttttgtttgatatgtggaagagttagatttgttttggtatagtaggatattttgaagagggagattagattttgtttttttttttattttggggttttttgtagattgtgtttttatttttttttaggttttagtgagttaggtggttttagtgtaggtttttgtattgtgtggtttttaagtgttttgatgagatgtgtttaattttttatttggattatttaatttttgtatttttgttaataaatagttattattaatgagatggtagattatatggggtgggtttgtatagataatgagagttttttaggtttttttgtgagtaaatttataatttttagtgatttagttggtttgaatttttttatatagaaaattgagttgaatttggtggtttgggtttttttttatgatttttggggttggaggttttgttttttgtaaatagttgtattttttttttttttttttgttttttatttttttttgtttttttaaggggtggttatagtgtgttataaattttatttttttagtgtgtaggagaggtgagaggaggttttgttttagttttgggtttgtttgtttttgaggatattaattaaaggtattaattggatagtaatatattaaagttgtttttgggagtgagtttttagagtattaggaatttgttagttgggtttttgttttaaatatagaaatatagaggaaaatatatatatatatatatatatatatatatatatatatatatatatatttttatgtgggtaagagtagggtttgtgttgtgttgtgtgggtttttttgtttttgtgtttgttgggagttttttttttttttttttttttttggtttggtatattaaatgattgtttttgtttttttgttttgagtttattttatttatttttttaaagagtgttgtttagaaggtttatttttttgggatatgtatattaatagagtttgtgtagatgtggtatgtggttttatttaagagtgttagttttgggagaaataaaattatttttttgtgtatattgttttggtttttttttaaataggttgagggagggtaagtagatatttggggaggtatttgttgtttggatttaattgtatggggtttttatgaggtttttggatgtttgtgggaggagggtgatagaggggaattggttttatttaggaggggttattttaggatatagaaagggatattttgatgggggaaggaaaggatttttttttgagggaagtagatgttgtttataggtttaagggtttttagaggagttagttatggaaagggttttggtttagagggatgtgaagtgatttgggtgtgttttttgtttttaaatggtaagtggtgggggttggggaagttgtggaaatgaggttttttttttgttattggtttagaaggaaggttaagtttttagagtttagaagttattagtaatttgtgttgtgtttgtaatgaggttttttgattttagttataaaggttttagtgttttgtgggttagatttaggtttgggggtatgagttttgtatggggagggatggagatttgggtataaattgggatgttttgtagttagtgtttgggggtttgttgttttttggtttgtttagtttgggttatatgtgtttgttgtttgtgtgagggaggtgggaatttgaagttggtgagagtgaggtttggtttgagttgttattgtagttatagttatggtgtaggttggtgtgttggggatttttggttttatttgggttttggggaggttagaagtgtttttaattttatagggttatgtttgttttttttttttggggagttagattggaatggttgtttttgattttatttgttattaattttggtatttgttttttattttataaatgtttttttttaagtaattgtttttgttaatagtgtatattttttagtagtgtttattgtgttataaataattttgatgaagatgtaaggatatgatttttataagattggataattgatttaatttgtgatttgtgatggtgaataatattggaaggttatttaaatagatgaaggtttaaattgttttgtttgtatttgaattaattttttatttattattattatgaagtgattggtttatttaagttttttagtttgttggaatggaatgggatttaaatgagattgtaatataatttaaatgtttgttgattttaatgaggttaattgagtagttgtaataaatataaatatttttttaaatagttgtgttttaaattattatttaatgtttttatgtttttttaagtggtagttttttttttttttttgtttttgtttagaatattatatatttatttgttgaaaaggtgattttggaaataattttgtgtttttgtttgttttgtagatagtaggatatgttttgtgattgggttttgttttgttttgttttgttttgttttttttttagagttaatatttttagggttttttaagttggtataaatggtgagttgagttttagttttattttaaagtagttttttgtgttgtttttgtagagtttgggaggagttgagtgatggaagaaatttgttgtttggatttagttatttatttagatgtagtttagttgggttttgtaaatgaatttgtgttattgtatttataaatgatattttgaagagtggtattgtttttgatttgtattgatgattgttattattttgaataaattagaattttaatatattttaaaggtattttttagaaagtttaatttgttggtagtttggttttttgtaaattaaaaggagtaggtggaggttgattgaggatttttttattagggaaggggtatagaaagagaattttgttataataaatggtggtaggatggtggaggagggggttgataattagagaaatgttaattttgtggttttaatttttttttttttttatttgtaattttatttttatttttttttttattatttttgggtgatgatgtatggagaggatgttaagatttttattttgagaatgttatttgtttggatatttttggtggtaattgtttattgtgatatttatgtttattttttggtggatatatggtggttggtgtttttgtagttggggaataatggaagtaattaagtgggagaagtttgaggaataaaagaattttttaaattttagtgaaagggttggggttggggatgtggggggatatttgatttattgtgaggatttgagtttaattttggggtgattgtttaaggttatgttttttttgaaaggtttagggtaaggagatgtattttgaatttttttttttttaatttttggttgagggagagggattttttgtttggagagtgtgggtgtagggtttgaaattag

SEQ ID NO: 43 - DNA, 4215 bp, Artificial Sequence
  chemically treated genomic DNA (Homo sapiens)
ggtgtttgattaagtgtagtttgtagtttgggtattgttaattgattttaattttttttatggtgagaggatggattttttgttatttttttgtttaatttggtatttatttatttatttatttattatgtttgttgggtgtatttaagtttaattttggggtgtatgtgttagtgtagatattgtattttttttttttttttggttaattttaggtagaattttaaaataattgtttttttttttatgatttagatgttgtggtttgtggataggaggtttaagaaatagtatattttgagtggtaggtagtgaggtggaaatggttgttggttttagtggtggttttattggaagttgagtttaggagtggttaagtggttgttggggaaagtattggggttttttagggttttttttgagtttttattttgtatttttgagggtgtgaaaattatgggagttgttttattttgtgtgtttagttttgttttagtttagatattgttttttgttagttttttttgtggtgtttagggaggatgtgttttgtttttttttaatttggttaatgggtgtttgggtagtgtgtggtttgtttttgtttttgttagggaaatttggaggaggagaaaagtttgtatagagggtggaaaggtgagagtggagttttaagtttggtagtttgagaggaagatgaatagttttaggttagagtttttggtagagtggattttgagttgtttttaggtagttaggagtggttttagtggtagttgtaaattttagtagttgtttgtgttgtttgtggttggggtggagggtagttagagttggggattaaggttttgtgttatttgtgtgtatagttttatatttgaatgttgtttttttgtagatgagattggtgggtattgtaaagttgggatttgtttttgaaggaaaaaaaatagtgagtaagaaatttagtattattttttattgatttattttgttgtattttttgttttttaagtttttgaaagttggtaattttgattttggtgtttaaaaattgatagttattgagattggttttgagaagttgaagatttggtagtttttagattgagtaggataaggtgaaagtaggttggaggtgggtttaggatatttgagggttgattttgggggtttgtgaggttgttattgttgttgttgttataggtgagatggtgttgggttgatgttggggttaatgggtagagaatgtagggatgtggtttttgttgaagagagttaagaagggaagagtgtgttttttaaattgtttttgtaatttgtttttagtgagtattttattgatttagaatttattgagaatagtattagtgagttattttttttttgagatgggttttatttattttggtaatggagtgagttggattgtggggaggaagaggaatgggaaaattagtttataaatattaatgttagtaagagtgtgttgttggtaggatgtattgtgagtttggagattttggtggttgtagttggtaagtggttataatttagaaagtaggattgagttgttttttttgttttattagtgtattgttttttgggtgtgggtttaatattttataagtggtaatttttgtttatggtagttttgttttttttttattatttttagatttagttttgtattttaaggttgtgtattgttagttattattatgtttatttttggggttaatttgtttgtttttttgagttttgattggttgaatagtttagtgattattttggtggtgatgtttatttttggggtggtgggtaatttggtggttattgtggtgttgtgtaagttgtgtaaggagtagaaggagatgattttttatatgttggtatgtgggttggttgttattgatttgttgggtattttgttggtgagtttggtgattattgttatgtatatgaagggttaatggtttgggggttagttgttgtgtgagtatagtatttttattttgtttttttttagtttgtttggttttagtattatttgtgttatgagtgttgagtgttatttggttattaattatgtttatttttatagttattatgtggataagtgattggtgggttttatgttttttgtagtttatgtgtttaatgtgtttttttgtgtgttgtttaatatgggttttggtagtttgtggttgtagtatttagatatttggtgttttattgattggattattaatgtgatggtgtatgttgtttatttttatatgtatgtgggttttagttttttttttatttttgttattgttttttgtaatgtgtttgtgtgtggtgtgttgttttgtatgtattgttagtttatgtgttgtattttgttgggtattgagtagtattatgtggttgtggttgttttggttgttttttggggttattttgttgtttttttagttttgttgtgttttagtgatttttggtgttgttggagtttttgttgtattgtgggtgttgagatttagatggttattttatttattgttatttttttggtggtgtttatttgttttattttgtttgtggtgagtgattggggttggggttttatttggttttttttttgtatttattttttgtgtttattttttgttttttgttttttttttgagtttttggtagtgaatgtgttgtttttaggttggggttgggatttttatattgttttttagagtaggtttaattttttttgaagttttaattttaatgagatttagtaggtgttttgtttttatattttttagtttatgtttttggaagtttgggtttttttttttattgagatagtttttattttttgttgtttgatattggttgagttttttaagaaaattttttgttttttttgttagatgtggaggggagtttgttgtagtgtgatttagtttatttttttgtattgtgaattgtgaattgtaaaatttgaaatgttagggatggtgatttgtttgttgtaaattatttttaaggaaagtggggtttttggtgttttgatgtatgtaaggttttttgaatttttttttttgtggattgtgtagaattttaaagttagaagagatattaagaggtgttttagtttaatttttttattttattgagggagtgaatgatatgtttaaaataatttagttgaatttatatagttaagttaggttttttgttttttattatggtgtgttttgggagggtagtttaaagtatataaattttaatttatatatagggtagggtttagatttagttttttttattttgtttagattaggaaagtaaagttttttagggtgattaattatggataggttgatatatatagggtatgggatttgaatttttgataattgtgtgaggtatagtattattttagagaaattgaggtttagagatggttgtttttgtttttttaagttaaagttttatagtttgtaatggattttaggttgtttgaggttagatttagtttatgtgttattatattatgttttttttgtagaatattttttattttggtgtttgtaaagtgtgggttggagttttggtatattttatttttagtttattttttaagaattgtttttggattaatttttaaaatatgataaatagaaaggtttaaattttatttagttttttattttgtttgtggttaaaatggaatgtattagaagtagatgggtagaataatgtaatattttatttagagttttttttgaaagtaattagttatgagtttttttattttttaaaatattgtatttttggaaattttaaattattaatttaaaaagagataattgtttttttttatgtttgttgggaataagagaatataaaatgtaatgggttattattttttttttttttttattgatattgtttagggatttttggtgtaaaaatatatttttgataaaagtgattgtaaatggaaggaatttagagggggtttagagttagaatatagtaggtttttattaatttgtataaatagaagtaaatataataggttataagagtttttaagttattttaggatttaatataatttatagagttaagttatatttgagttatataaatatattttattgtttgtaatggtaatttagaataaagtgagattttggaagaaataatattgtttttgatggg

SEQ ID NO: 44 - DNA, 4215 bp, Artificial Sequence
  chemically treated genomic DNA (Homo sapiens)
tttattaggagtagtgttgttttttttaaaattttattttattttaggttgttattatagatagtaaaatatatttatgtggtttaagtgtgatttaattttgtaaattatattgggttttggaatggtttaaaggtttttatggtttattatatttatttttgtttatataaattggtaagaatttattgtattttggttttgagttttttttaagttttttttatttatagttatttttattaaagatatatttttatattaaagatttttggatagtattaataaggaaaaggaaggaataatagtttattatattttatatttttttgtttttaataagtataagaaaaagtagttatttttttttgagttggtagtttagaatttttaggaatgtagtgttttggaagatggaagaatttataattagttgtttttaagagaaattttagataaagtattgtattattttgtttatttgtttttggtgtattttattttagttataggtaaagtagaaaattaggtagggtttgagtttttttgtttattatattttaaaagttaatttaaaggtaatttttaaaagatgaattaaaaatgaagtgtattaaaattttaatttatgttttataaatgttaaaatgagaaatgttttatgagggagatgtgatgtaataatatatgagttgggtttggttttagatggtttaaggtttattataagttgtagagttttggtttgaagaaataaagatagttatttttaaattttggtttttttaaaatggtattgtattttgtatagttgttgagaatttaaattttatattttatgtatattagtttgtttataattagttattttgagaaattttgtttttttggtttagatagaatgaaagaaattgagtttggattttgttttgtatatgaattagaatttgtgtgttttaagttgtttttttagggtatattatggtaaagagtagggagtttagtttgattgtgtaggtttggttggattattttaagtgtattatttatttttttagtgaagtgagggagttagattaaaatattttttgatattttttttagttttaaaattttatgtaatttatgggggaagaaatttaagaaattttgtatatattaaaatattaaaaattttattttttttaaaaatggtttataatgaatagattattatttttgatattttaggttttgtagtttatagtttatagtatggaggaatgggttaagttatattatagtaggtttttttttatgtttaatagagggggtggggggtttttttggaagatttggttagtgttaggtagtaaggggtaagggttgttttggtggagaaagaaatttaggtttttgggaatataaattgggggatgtaggggtaaagtatttgttaaattttgttagggttgggattttaaagagggttgggtttgttttgagaaatagtgtgggaattttagttttgatttaaaggtgatatgtttattgttaaggatttagagggaaagtagggagtggggaatggatgtgggaggtggatgtgagaaaaaggttgagtagggttttagttttggttatttattatgagtgggatggagtagatgagtattattagggaggtggtaatgagtaagatgattatttggattttggtgtttgtgatgtggtggaagttttggtggtgttgaaagttgttgaggtgtggtaaggttggggaggtagtggggtggttttgggaggtaattgaggtggttgtggttgtgtggtgttgtttggtgtttagtgaggtgtggtgtatgaattggtggtgtatgtggagtagtgtgttgtatataagtatgttgtagaggatggtggtgagaatgaggaaggagttgaagtttgtgtatatgtaggagtaggtggtgtgtgttgttatgttggtggtttagttgatgaagtattaggtgtttgggtattgtagttgtgagttattgagatttatgttgggtagtgtgtaaaagagtatgttggatgtatagattgtaaagagtgtgaggtttgttaattgtttgtttatgtagtggttgtagaaataggtatggttgatggttaggtagtgtttgatatttatggtgtagatgatgttgaggttggataggttgaagaagagtagaatgaaggtgttgtatttgtatagtggttggtttttgggttattggttttttatgtatgtggtgatggttattgggtttattaataaagtgtttaataggttggtgatagttagtttatatattagtgtgtagaaggttgtttttttttgttttttgtgtgatttgtatagtattatgatggttattaggttgtttattattttgaagatgaatattattgttgggatggttattgggttgtttagttggttggggtttaaggaggtggatgaattgattttgggagtggatatgatagtggttggtggtgtgtagttttggagtgtaaggttgggtttggggatggtagaagagagataaagttgttgtgagtggaaattattatttgtaaggtgttagatttgtgtttgagaaatgatatattgataagataaggggagtaatttgattttattttttggattgtagttatttattaattgtggttattaaaatttttaggtttgtgatatgttttgttaatagtatatttttgttgatattaatatttataaattgatttttttatttttttttttttttataatttaatttattttattgttaagatgaataagatttattttaagggaaaagtagtttgttagtgttatttttgatagattttgaattaataaaatgtttattgaaaataagttataaaagtaatttggagagtgtgtttttttttttttggttttttttggtgagggttgtatttttgtgttttttatttgttgattttaatgttagtttaatgttattttatttgtagtggtagtagtggtggtagttttatgagtttttagggttagtttttagatgttttggatttgtttttaatttgtttttattttgttttgtttagtttggaaattgttaaatttttggttttttaaagttggttttagtggttgttgatttttggatattgaggttagagttgttagtttttaaaaatttgggaaataagaggtgtagtgggatgggttagtgaagaatggtgttggattttttatttgttatttttttttttttaaagatgagttttagttttgtagtgtttgttggttttgtttgtgggaggatagtgtttaggtgtgaggttgtgtgtgtaggtggtgtggagttttggtttttagttttggttgttttttgttttagttatgggtagtatgggtggttattggagtttgtggttgttgttgaggttgtttttggttatttgggggtggtttggggtttattttgttagaggttttggtttggggttgtttattttttttttgggttgttgggtttggagttttgtttttgtttttttattttttgtataaatttttttttttttttaagtttttttggtggaggtggaggtaaattgtgtgttgtttgggtgtttattggttggattggaagggggtggagtgtgttttttttgggtgttgtagggaagattggtggggggtggtgtttgggttggggtggggttgggtgtgtggggtggggtggtttttgtggtttttatgtttttggaggtgtggagtgggaatttggaggggattttgggaagttttggtgttttttttggtgattgtttagttgtttttgaatttggtttttagtggggttattattgaaattggtgattgtttttgttttgttgtttgttgtttggagtgtattattttttgaattttttgtttgtgggttgtaatatttagattgtggaagagagggtagttgttttaggattttatttagggttggttgagaaaggagaagaaatatggtgtttgtgttagtgtgtgtgttttggggttagatttgggtgtgtttagtggatgtggtaggtgggtgggtgggtgggtattagattgggtggggaaataatgaagaatttatttttttattataaaaggagttggagttagttggtagtgtttagattgtgggttgtgtttggttgggtatt

SEQ ID NO: 45 - DNA, 5473 bp, Artificial Sequence
  chemically treated genomic DNA (Homo sapiens)
gtaatgttaattagttttattttaaagaaaaattaaatattagagtaaataatgatttttttgtggagaaggagttgtaagggttggggagaggtaattagtgttataaaagttttattataaagaagtttagaatttttttgttttgttgtgtagtagagtgaaatatagtagtagaataattgtgtattattattatgataatttaatttgtttttttagaaaaagttattgtttgtagttaggatagtaggaaaatatttagaaaataattaaaatgtaaataaaagtatgaaataataataaagtttattttttaagagaaaaaaagaagagtatttagtgaaaggagaatgaagtatatataaagtaagtaatttttaggtattttgtttttttggatgttatttgtttaaatttgataatttttataggtagtatgatagattttttaaaatttaaataaagtttgtttttgtattttatttttaataataaagtatattgattgatttataaattaaagtttttaaaattttattaaagtaaaaatattgttttagagtttttattggtatgtttttgaaagtaagtgttatagttaatgtaaatttttaaaaatttttttgttatttagtataatagagggtggattttgtgttagggtggtattttttgtgtaatttatatggtttgaggttttttgttttttttttttttagaagagttggaattaagatattaataattataattgtaataattattattatgtttttaaggggttgttgagtttttggagattttagtgtatagagtgaagtaggagaggtttaaaaaggaaggttttgttgttgatgttgtgatgattaaggtagtttattattattttttttttttaatgtgattgttttgttttttttttttttgattttgttataagatgtggggaagttttttaagaattgtgtatagtttgttatagatggtggtttttgtgtttagagattgaaagagtatttgttatagtgatattttgtaatagttgtagatgtgtgggtttaaaattgttttatgtgtttaaattaataataattattattttattttattttattatttgagtggaaatataatttgaaatatttaaatttgttttttttaaagttagaaggatatgtgtatgtgaatgtatataatttgtttttttaaatgtttttaaagtttatttttgttattatatttgtttttataattaataaagaaaatttgttttagttttaattttattgggtatggtatgtgttggagggtaggttttggaaatataaatattaatatatgtggtttgttttaaaatttaatgtatttagggttagttttgttgttttggttaaatgaatgaataaagagtgattaaaatgtgtttatttttttgttattttatatatagtttgagattgattgttaatagtagattgtaaatttttgtatttaatagttattaattttttttatagtttgtatatttataaatttaattgggatatttgtttgataaatttagattttgtagagtagatttttaaggaaatttaattttagagaataaaatattttttggaatttttaaggtatttagagataaaatgttttttgtgggatttttttttaagttttataaaagtaggtttattaggattaaattatattaaagttagtgtgaggtaaggggggtgtggtttatagaaattttgggagaaagtttagtatagttttttttttttgggaatatatgttaggatggaaaaaaaaaaaaggaggggagtgttataggattaagatttattttggaaaataagatttttagtaaagatattttttttttttttattttatattagatattagaagtattattttttgagtgtgttttttaagtttttttttaattttaggttttttttgttttttgggtttttgattttttggtagttgggtatttgtatttgggtttttgataggtttagttgttggtttagttttttttgtatgaaggtgttgggatagtgggttttgttaaaaagtttttttagtttattgagttgttttagggtgaaattggtttgattttgtttttgtttgattttggtttggtttttgttttttattttttttgtattttttttgtgattttttagttttggggatattggagggggtattttagtggggttatatgtgtatttatatgaatatatatatatatgtatatatatatggatgaaaatagtatagtaaattttgttattagatttgttgtaaaaaagaatagagaattttttttttttgtggaattttggtttggttttttaatttatttggaggaagaatattttggagaagtgtaaaggttaagtttgagtggttgtttggggtaaggtgggtagttatttattattttttttataaatgtattttgatttattgttttattatttattttttagttattggttttttttagtaaatattaaatggtttttatttatttttgtatttatttgttttgtagtatttatagaaattaaaggtgtagtgttaggttttttatagagtaaagtttggatataagggtgtggtaaggttatttattggttttttatattggttatttttagaaggttggtttgtttttaggttagtttttattattgttggttttttgtttattgtaaatttgttggtttaatttaggaataattgggttgaaaggtattagtgagagtaatagattttggtgttgtgttgtatagggagttgtatttgtagatgttttttgttgtttttgggtttgggttaaattttgtataaggttttttggatagttaggtaatttttgttttgtttgtttgattggggttgtatgagtataggtgtttatgttatgttggttgtttaaagggtttgttgtttaagttgggttagaaggtaggaggtggaaaattagtttttggtggtgggtgaaagtaattgttttttttgttttttttttgtttttttttgtggaaatgtagatttgattttaaatgtttaatttatagagattaataggtttaagtggaatatttgtgatttttggtttttattggttgtttaaagtttttttatgtaattagtagtttggatgtttaataaaatatgaatttttttgttttgggtttgtatatatttgttgttatttttttgttttttttttttttttaaaaataggagtttttttagtgtgagtatatatagttattatatatatatttttttggaatttttattttttgtgtttgaattagagattttgggttttaagaagttaaagttgagtttagatagttgaggttgtttgtagttttttttagtgtaggatttaggttagtatgggtgttaaaaattatttttggaagagttggtttgtagagaaattaatatttgttttgagtttggaaattaataattttaggaattgtgtttgttgggggtttagatttgaattttgttgttaggtgtgttggtgaatttgtagtttgggtttgtagttgtggatttatggttgggaggttgtattgggtattttgatggtaattttattattttataaatttaggaagatttggtgttggtttggaggaagaagagttgttagattttggttttgttgggtattttagttatggtgattttaaatattgttgtattttttagtttttagagttagttttgtggatatttgttttttttttaggaaggaatattatagtaaatattatgggttaatttaatagtaaagtatttttattgatattgtattgaaatttaaatatgaaaatatattttttaaattttgttaatgaggtgggaaggttttgtttattatatgttatttatatagtggatgttatttaaagttttggggttttgaggagatgtttaaattttaagttgatttatagatttaataaaatttttatttttgtttttaaatttttaattattgatttaaataggaatagattgtgttataaataatttaattgtttgtttaaatatgtgattttatgtatgttatatatttttttaattggaaaaatatggtagtatattagttattgtaggtattaagtgttaaattaattttattgttgaatttttttgaattggtatagaatgttttgttattgagataaagatgttttttaatattgagttagtattaaaggatttttgttttaagagaattgagtattgggtgattgaaaatattaaaggaattgtgtaaatatagatttttattttttttgttgttttttttttttgtttttaatatattaagaaattgaaatgttttgtttgggagaagtagtgtagtttggattttagtttttgttggtttttttttattttgaaagagaatgggaagttttggtttttaagatttaaagatttaggggttttgtggagtttgaggggttttggtggttttaaatatttaggtgattggagggttaagttttttatttttgtttttttttttttttggtaaattttgtgttagaggttagttttagttttgttgtttggtttagtatttttttttgtagtttggttttgtgaatttttatgtttgtttgtgggttatttgggttgtgggtttatttttttgttggtgaaaaatgtattttggtggaatgggaatatttgggaagggtgtgtataaattttatatgtttttttttatgttatttttataatatattaggattttatttatgattgagtatattattggatttttatttttttattattattttagttgataaagttggggtttagggttttttttgtgttttttttttttttttgttgggttttggagtttttttttgtttgagaggagtttggaaggtgggaaggggaattgttgttgggggttagttaggttgttattttttgttagttgtgggttgtttggttttttgttttttttggtggtgtttatgtttagtttttggatgggagagtgtttttttttagtttttttgtttgttttttttttttttatattttttttgttttttttgttgttgtttttgttttttttgttgttgtttttgttggttgtttggattgttgggttgttgtggttgttgtggtttgttttggtgtagttggttggttttttggttttgtgtagtggtttgttttttagtattttttggtatgtgattgtttttttttttttttttattttttggttaaaagatttggagatgaatgttgtaagtttttttattgttgttgtatgttagtttggtgtttaatttttgttagtagagttttgtttttttttttttttttttttttttattgttttagtttttttaataataatatattaatgggataggaggtgggg

SEQ ID NO: 46 - DNA, 5473 bp, Artificial Sequence
  chemically treated genomic DNA (Homo sapiens)
ttttattttttgttttattgatgtgttattattgggggggttggagtagtaaaaaaagaagaaggaaaaaaagagtggggttttgttggtagaggttgagtgttgggttgatgtgtggtggtgatggaagaatttatggtgtttgtttttaagttttttgattagaaagtgaaggagaagaaggaggtgattatgtattgggaggtgttggagagtgggttgttgtgtggggttaaggagttgattggttgtattgaggtgggttgtgatgattgtagtagtttggtagtttgggtggttggtggaggtggtggtggaggaggtggaggtggtggtggaggaggtggaggaggtgtaggaggaggaggagtaggtggaggagttggaggagggtgtttttttgtttgggagttggatatgggtgttgttgagagaagtagggagttgggtagtttgtgattgatggagggtaatgatttgattgatttttggtagtggtttttttttttgttttttggattttttttgggtgggagaggattttgaggtttagtggggaggggagagggatatggagagggttttggattttagttttgttagttagagtgatagtggaagggtgggggtttggtggtatgtttggttatgggtggggttttagtgtgttgtgggggtggtgtggggggaagtgtgtggggtttgtgtgtgttttttttagatgtttttattttattgaaatgtattttttattagtgggaggatgggtttgtagtttggatggtttgtaggtggatgtggaagtttgtggggttgggttgtaggagggggtgttgaattagatggtgggattaaagttagtttttagtgtagagtttgttgggagggagaaggggtagaggtggaaagtttaattttttggttgtttaggtgtttggggttgttaagattttttgaattttgtagagtttttgaatttttggattttaggggttaaaattttttatttttttttaaggtagaaggaagttaatgaaagttgaggtttaggttatgttgttttttttgggtgaggtgttttggttttttggtgtgttgggggtggggggggggggtggtgggggaggtggggatttatatttatataatttttttagtgtttttaattatttagtatttggtttttttagagtaaaaattttttggtgttagtttagtgttaggaaatgtttttattttaatggtagagtgttttatattaatttaaaggagtttaataataaaattgatttggtatttggtgtttgtagtaattggtgtattgttatatttttttaattaagaaaatatgtggtatgtgtggaattatatatttaagtaagtaattaagttgtttatgatatggtttgtttttgtttagattagtaattggaaatttggggataaaaatagagattttattaagtttatggattaatttgaaatttggatatttttttgaagttttaaaattttgagtggtatttattgtgtagatgatatgtaatagataaagtttttttattttattggtagaatttgaagggtgtgtttttatatttaaattttaatataatattagtaaaaatattttgttattaaattggtttataatgtttattataatgtttttttttaaagaaaggataaatgtttataaaattaattttgagaattagaaaatatggtaatatttaagattattgtagttagaatgtttggtagggttgagatttagtgatttttttttttttaaattagtattaggtttttttaaatttgtaaagtggtggagttattgttaaggtgtttagtgtagttttttggttatgagtttataattataggtttgaattataggtttgttagtgtgtttgatggtgaggtttaggtttgaatttttggtgggtgtagtttttgggattgttgatttttaagtttagggtaagtattaatttttttgtagattggtttttttggaaatgatttttaatatttatgttggtttggattttgtgttgggaagaattgtaaatagttttgattatttaaatttagttttgattttttaaaatttggagtttttgatttgggtgtagaggataaaggttttagggggatatatatatggtggttgtatatgtttatattagaagagtttttgtttttaaagggaggagaaggataggaaagtggtaatggatgtgtgtaaatttagagtagaaaaatttatattttattaaatatttgagttgttggttgtatgaaaaggttttgagtaattaatagaaattgaggattgtgaatattttgtttgaatttgttgatttttgtgggttaagtgtttagggttgagtttgtgtttttatgagggagggtgaagagagaatagaaagagtggttgtttttgtttgttattggaggttggttttttgttttttgttttttggtttggtttgggtggtgagttttttgggtagttaatatggtgtgggtgtttgtgtttgtgtgattttggttgggtaggtgggatggagattatttggttgtttaggggattttatgtagggtttggtttgagtttaggggtagtgaggggtgtttgtggatgtggttttttgtgtggtataatattggggtttgttgtttttgttgatattttttggtttaattgtttttaaattagattagtaagtttgtggtaggtagagagttagtggtggtgagagttggtttgagaatgagttagttttttgggaatggttggtgtgagaggttagtgggtggttttgttgtgtttttatgtttagattttgttttgtgagaggtttggtgttgtgtttttgatttttgtgagtgttgtggagtaagtgagtgtgaaagtgagtggaaattatttggtgtttgttggggaaggttggtgattggggggtgaatagtgaggtggtgagttgaggtatgtttgtgaaggaggtggtggatgattgtttattttgttttaggtggttgtttagatttgatttttgtgtttttttgggatattttttttttgggtgggttgagaagttggattaggattttatgagggggaaggattttttatttttttttgtgataaatttggtaataggatttgttgtgttgtttttgtttgtgtgtgtgtgtgtgtgtgtgtgtgtttgtgtggatgtatgtgtggttttgttggggtgttttttttagtgtttttggagttgaaagattgtaaagaggatgtgaaagggatggaggatgaaggttagattaaaattaagtagaggtgaagttggattaattttattttggaataatttaatgagttggagaggttttttgatgagatttattattttgatgtttttatgtgagaggaattgagttagtgattgggtttgttggaggtttgagtgtaggtatttagttgttaggaggttgagggtttagggagtagagagagtttggggttggaaagaggtttgggggatatatttgggaggtggtgtttttagtgtttggtgtaagatgagaaggaaagagatatttttattagaggttttattttttaaagtagattttagttttatagtatttttttttttttttttttttttattttaatatatgtttttagaagaagaaagttgtgttgggtttttttttagagtttttataaattatattttttttgttttgtattggttttaatgtggtttaattttaatgggtttatttttataaggtttaaaaaaaaattttatagaaaatgttttatttttggatgttttaaaagttttaaagagtattttgttttttggagttggatttttttgaaagtttgttttgtagggtttaggtttgttaagtggatattttaattaggtttatagatgtgtagattataaagaaaattagtaattgttaagtgtagaaatttatagtttgttgttagtggttgattttaaattgtgtgtgaaatagtggagaaataaatgtattttggttattttttgtttatttatttaattaaggtaatgaaattgattttaaatatattagattttaaaataaattatatatattagtatttatatttttaaagtttgttttttagtatgtgttatatttaatgaagttaggattgaaatagattttttttattggttgtggaggtaaatgtaatagtaaaaataggttttgggggtatttaaaggagtaaattgtgtatatttatatatatatatttttttagttttagggggaataaatttaaatgttttagattgtatttttgtttagataataaaatagaataaaatgatagttattattggtttgaatatatggagtagttttaggtttgtatatttgtagttgttataaagtattgttgtaatagatatttttttggtttttgggtatagagattattatttgtagtgaattatgtataatttttaaggggtttttttatattttgtaataggattaggaaaaaaaaaaatagagtagttatgttgaagaggaaaagtaataataggttgttttggttattatagtattagtagtagagtttttttttttaagttttttttgttttgttttgtgtattgagatttttagaggtttagtaattttttaaaaatatgatgataattattatagttatgattattagtattttaattttaatttttttaggggaaaaaaaggtaagaagttttaggttatgtgaattatataaaggatgttattttggtataaaatttattttttgttgtattaaatagtagagaaatttttgaagatttatattgattatgatatttgtttttaaaaatatattaatgaaagttttgaagtagtatttttattttaatggggttttaaaaattttaatttgtgagttaattaatatgttttattattgaaagtggaatataaaagtaagttttatttgaattttaaaaaatttgttatattgtttgtaaaagttgttaagtttaagtaggtaatatttaggagaataaagtatttaagagttatttgttttatatatattttattttttttttgttgagtgttttttttttttttttttaagaagtgaattttattgttgttttatatttttatttatattttagttattttttagatgtttttttattattttaattgtaaatagtggttttttttaaagaagtaaattagattattatgataatggtgtataattattttgttattgtgttttattttgttgtatagtagaatagagaaattttaaatttttttgtagtgaggtttttatgatattaattatttttttttaatttttataattttttttttgtaaaggagttattatttgttttggtgtttggtttttttttaagatgaagttaattaatattat

SEQ ID NO: 47 - DNA, 5328 bp, Artificial Sequence
  chemically treated genomic DNA (Homo sapiens)
ttgataagagaaaaggtgttgagggtaggttgtgttgttttatttatagtttattgtttgttgtagagtttttgttaggattggaaagttaatttagtgttgattaaaagtattatagagttaaaggattggtaatgattgttaattttattttagttttatgtatttttaattgttgtaattaaagatatgttatttaaatataggtgaagggttttttttttttaagttgggttgggggggggtgggtgggtggattataattttatttagattttttattttatttgggtgttatgtagttttaaattagattttattattattattatttagagttgttttttgttatttatatttggttttgtagaattggaagtgtgaaatgtgttatttatataaaagtttttgtttaaagaaagggtgggatgggggagtgtagaggagtaattatttaggggtgatttaaatatttaggtttttttttttttttttttaaattaatagaaaggtttttgatatagttaaaagtatttgaaattgggggtaaggttaataggttaaagggattagtgttagttttttaagtatttttaaaaagattatgtgaatagatggaaaaatatatttttaattaaataattttttttatattatagttgtagtgttggtttagaaattgtgtaattttttatttgataggagtttttttatgagaatattaaaggataaaaagttttgtatttttgtagttggttaaaattgataattatttttttatgtgtgtgtgtgtatatatatatatatatatatatatatatatatattaatatatatatatatatatatatatatatatatatatatatatatttttaaaaaagaatttagtttttaatttttttttatttatgaagattaaagttttgtatttgattttgtgagtggtttttgttttttggggttggaatttgatttagatgtgaagtggtattgagttgttgtgtaggtttgtgtttagtgttttttgttggatatagtaggagttgtgtagtgttagttttagaaattgttggaattttgttttggggttagagaaaatttttttattgttttttaaaaaagaaatgggatgtgaaaataaatttttatatttttgaaaaataatataatattaatttaataaaaaattaaagaggtgatattataattttaatttaataaaaaataaagattgttttttttatattttagttattttttatttggtttggttttgtaatttttttgaaaggttttgtgatggtaaaataggtaaagaaaagtgatgaaaaataaagtatttttttgtagttgtggagaattaagtaaagtatattttttttgttttgtttatattttaaaaaattaaatggaagatgttgttgtttgttgttttgatgttgttagtagtgttttgaatgtttttagaggttttgtaagtattgtaattgagtttttgagtaaatgaaataatttgtttttatgtgtttatttttagagtataattaaaagattagttttttttttgagtgttttttattttttagattaattttggttaaagttttttttttttagatattggttaagaaatatatattggttaagaaataggtgtttggtatttttttttttttattttagttgtaggattttggggaaggtgtgttaatggtagggaaggttttttttgaaatttagtattttgttgattaggaatttaaattattttagggaagggggagtatttttatatttttaaaaaattatttgtttatataataaagagttttgttttttttattattattattttttttttttttttttggttagtaagtgagggtaaaagtagtttttgaattattttagaaagagaaattgtaaaaatggtatattttttgaatttaaaataatagggaaatgtgggtttgtttaattgtttaaaattaaatagaaataattattgtgttaaatgaataagatgttttaagatttatatttttagggttatggttattgattttaattttatttttaagaagtttagagattgtgtttttaaagtttgtttattgatggaaattggtttaattttttataaaagaatggttttttaaaatattgaatattatggttatgtaaggtttatgatatttttatgtttattttttttattttttaaaattagtgaatttgagataatattttaaggggaattgttatttagtgtgatgagagatgatttttttatttggttttagaattagattttggtttaggttttttagtaagtaggtttagatgtaatggaaggagagaagaattaagttttttgataaaatttttattttgaattttatggaaaagataggtaagtgggattttagttatagtatttttattttttgttttattaaaaggtttgtttttattatagaaataatatagttggtgttagttttgtgaatttgtgttaattgataaggtaagaaatggtgtgttgatagttgaggtttgaaggttgtttagtggtttttgtagtttgtggggtagggaggttaaagttagtaaaatgttggaggtgatgttagaaagagagtatatgtttgttatttggaagtgatgttgaatgtgtaatagtagagttttggagatttttattttgttttgtatttagggattttagtttgtggggtagtaggttgttgggtgaaggtaggagggagaagttgtatttggttgagggtgggtgggtgtgttgggagtgagtgtttaattttttagggtttatggagaaagtataatttttagttgaggaaagagagttaaataagtgggtggtttaggtttgggaatgttatttagtttttttgatgtagtgttatttttgtggttttagggggttttagtatttgtttgaattttattttttaaggttgttagtaggaaggtagtttttttatttttgagggttgaggagggggtagtgagtgatttgattttttagtagtagggaaaattgtagtggttggtaatgggttgtgtttttttgtggtggtaaagtgttttttaggggtggggtgggtatttttggttttttgttttagtgtttaggtttgagtttgtgtgggttggttgggtgttttgttttgtaagtaattaattttgttggattttgaggattatttaggtggatgggtttatttagtttaggtttattgagattttgttaattttttagattttttttttttttattttttatattttttatgatgaatttaggaaagaatttgaattttgaaaaatagtatatgtggtttgaagtttgatagttatttgggtgtgagggatatgattttattaataaagattaagatttaaggttgagtttttatttattaaatttgtttttttattttgtttttaaattttggagattttttagttttgttgttttaattttgatatagataaaggtgttagggagaaagtttaggtgggtttgaagtagttgaggtatagattgatatttatttttttattatttagatgggtagataagtattgttagattgggggttttaatttagggtttagtggttatgtgggttgttgtggggtgttgaaattataagtataatttgatattattgagtttatggtgtttgttaataatttgtgaattaggtgtagagattgttattgtagattataatagtttttgaaggatttattatagtttattgtgttaatgatttttaaattaaggaggggaggtggggtgagatgaaaaaggagtggggagagttagtaaaaagggaagaagggtgggagggaagataaaagttagagttttagttttgaaggagtttttaaagattattaggttagtgatttgagaattttattgggatgggtttggaaatttaattttatttgagttaggattggaagaggggtgttgggggtaagtagaagtgggtttttgggaaggttgattttttaggtattttttttgaggttggaatagtttttgggagagggttttagatgttaatgggaggttttgaggatgttagtttgtttaggatgggtgtatattttgatttagagtattttttagggtaagttgtagttgtagatttttgaaaaaagtggtaatagttttgtttagggatgatggtgattgtaggatgattttttttttttaatggtttgttttaatttttttttatgttataggtgaaagttttttttttttttttttgatagtatttttgtttgttttttatatgttatgtagatttaatttttttttttaatttgtttttttgggtgttaaatatattagttttttgagattttattatttttgtggtttgtattgagtttaattgtaattttggaaagggaatttgtggataatatagtagtagtatgttttataagattttagaagaaagaagattaaattttatttatgtggtgtggtaggggttaggttaagggaaagaggttttttttgtttggtaaattgtttttgtagtgaaagggtagtttagtttttattggagtgttatttaatattggttagagaaaggttaaggaaagtgtaggtttgttttttttataaaagttgtggttataattaaatgaagtaattatagttggagaatttaaaataattgttttttttttaaaatgagggtaataattttagttattggaaaattgggattttaaggaaaatttttttttttggtataattaattgtataagatagtgtggttaattagagatatatgtatttagatttaagtaatgatttataggtgtaaaaggtttagtggttttttgggttatttggagtttttattgattattttgttttttaaaaaatttttttttaattttaaaaataaaagttatagatttaatgtaattgaaaattattgatggtagttttttaggtttttagtttatgtttttaaagggaatttatatttaaaataattaaattatttaatggttatattatatttttttttggataatagttgtagtgtagggatagaattttaatttatattaaaattgtttgataatttagaaatggaaatgaaattgtgaattaatttttttagaaaatatttgagttagaatataagaaggatgtttatatataatattgtaagtaatatgatgattattatatgtagtttgaaagatttatataaatgattatatattatttttgttgttataatttaaagtaaggg

SEQ ID NO: 48 - DNA, 5328 bp, Artificial Sequence
  chemically treated genomic DNA (Homo sapiens)
tttttattttaaattatagtaatagaagtagtatataattatttgtgtaggttttttaagttgtatataataattattatgttatttatagtattatatatgaatattttttttatattttagtttaaatattttttggagaaattaatttataattttatttttatttttgaattattaagtaattttaatgtaagttaagattttatttttgtattatagttgttgtttaggagaaaatgtagtgtgattattaaatgatttaattattttaaatataaattttttttaaaaatataaattgaaaatttgaagagttgttattagtggtttttagttgtattaaatttatgatttttatttttaaaattagaagaaaattttttaaaaggtaaaatgattagtaggaattttaggtagtttaaaaagttattggattttttatatttgtaaattattgtttgagtttaaatatatatgtttttgattgattatattattttatgtaattaattatattaaaggaaaaggttttttttagaattttaattttttagtggttagggttattatttttattttagagaaaaaatagttgttttaaattttttaattgtgattattttgtttagttgtgattataatttttgtgggaaaaataaatttatattttttttaatttttttttagttagtattaaatgatattttagtgaaggttgggttatttttttattgtaaggataatttattaagtagggaaaattttttttttttagtttggtttttgttatattgtataaatggaatttagtttttttttttttggaattttatggaatatattgttattgtgttatttataagttttttttttagaattatagttggatttaatataaattataaaagtgataaaattttagagggttgatgtgtttggtatttaaaaaaataagttggggaaagaaattagatttatgtaatatgtgagggatagataggaatattattagaggaaaaggaagaaagtttttatttgtggtatgaaaagaagttaaagtaaattattggaaaaaaaaagttattttataattattattatttttaaatgaaattattattattttttttaaagatttgtagttgtggtttgttttggaaagtgttttaaattaaagtgtatatttattttgggtgggttggtatttttaaggttttttattgatatttagaatttttttttaaaagttattttggttttaaaagaaatgtttgagaagttggtttttttaggggtttatttttgtttgtttttagtgttttttttttagttttggtttagatggagttgggtttttaaatttattttaatggaatttttagattgttggtttgataatttttaaaggtttttttggagttggggttttgatttttatttttttttttattttttttttttttttgttggttttttttattttttttttgttttgttttattttttttttttaatttgaagattattgatatgataggttgtaatgagttttttagaaattgttatgatttatagtgataatttttgtatttaatttatagattattgataagtattgtgggtttaatggtgttaagttgtatttgtggttttaatattttgtagtaatttatgtagttgttgggttttggattaggatttttagtttggtagtgtttatttgtttgtttgagtgatggagagatgagtattagtttatattttaattgttttaagtttgtttgggttttttttttggtgtttttgtttgtgttagggttggagtaatgaaattgaaagatttttagagtttgaaaatagagtgaaagagtaaatttaataaatgagagtttagttttgaattttagtttttattaatagagttatgttttttatatttaaataattattaaattttaaattatatgtattgttttttagagtttgggtttttttttgggtttattatgaaaggtgtgagggatgaaggggaaaagggtttgaggagttggtagggttttagtgggtttaagttaagtgggtttatttgtttggatagtttttagaatttagtaagattggttatttataaagtagggtgtttagttaatttgtgtgggtttaggtttggatgttgggataggagattaaaaatgtttgttttgtttttaaagggtgttttgttgttgtggagaaatgtggtttgttgttagttgttgtggttttttttgttattaaggaattaagttatttgttgttttttttttagtttttaaagatggaggggttgtttttttgttggtggttttggggagtgggatttgggtaggtgttggggttttttgggattatagaaataatattgtgttgggagagttgggtggtatttttaggtttgggttatttatttgtttagttttttttttttaattaggggttatgttttttttatgggttttagaaagttgggtatttgtttttggtatgtttatttgtttttagttaggtgtggttttttttttttgtttttatttaataatttgttattttataggttgggatttttgggtgtggaatggggtggaaatttttaggattttgttattgtatgtttgatattatttttgaatagtaggtatatattttttttttggtgttgtttttaatattttgttggttttggtttttttattttatgggttgtgggaattattgagtagtttttggattttggttgttagtgtattgttttttattttattggttggtgtgggtttataaaattagtattgattatattatttttgtaatggggataagttttttggtagagtaaaaggtgggggtgttgtggttggaattttgtttgtttgttttttttatagaatttggggtagagattttattaaaaggtttgatttttttttttttttattgtatttgaatttatttattaaaaaatttaagttgagatttaattttggaattagatggagaagttattttttattgtattaaatagtaattttttttgaaatgttattttgaatttgttaattttgggaggtgggaagaataaatataaaggtattataaattttgtatagttatagtatttaatattttaaaaagttatttttttatgaaaaattaagttgatttttgttaataagtaaattttaaaaatgtgatttttaaattttttaagggtaaagttaaaattaataattataattttgaagatgtaaattttaaaatattttgtttatttagtatagtaattatttttatttgattttaaataattaagtaaatttatatttttttattgttttaaatttagaggatgtgttatttttatagtttttttttttgaaataatttaaaggttatttttgtttttatttgttgattaaaaagaagaagaagaaataataataataaaaaaggtaaagttttttattatgtagataggtagttttttggaagtgtaaaaatatttttttttttttaggataatttggatttttggttaatgaaatgttgaattttaaagaaaattttttttattattggtatattttttttgaaattttatggttaagatgaaagaaaaaagatattaggtatttgttttttagttagtatgtgttttttagttagtatttgggaaggaaaaattttgattaggattggtttaggggatgggaaatatttaaagaagagattggttttttaattatattttggaaataaatatataaaagtaagttattttgtttatttgaaggtttagttatgatatttgtaggatttttgagggtatttaagatgttgttgataatgttaaaatagtaagtagtagtattttttgtttaattttttgaaatgtggataaaatggaggaagtatattttgtttgattttttatggttatagaaaaatgttttgttttttgttatttttttttatttgttttattattgtagaattttttaaaagagttataaaattaaattgggtgggggatggttgggatgtgaggaggatagtttttattttttattgaattaaaattgtagtattgtttttttagttttttattgagttaatattatattattttttaaggatataaaaatttgtttttgtattttgttttttttttggagggtaataaaagagttttttttaattttagagtaggattttagtgatttttgggattggtgttgtgtagtttttattgtgtttaatagggggtgttgggtatgaatttgtgtagtggtttagtgttgttttatatttgagttgggttttagttttggaaggtgagagttgtttgtggggttgagtatagagttttagtttttgtggataaaaagagattaaaggttaaatttttttttggggatatgtgtgtgtgtgtgtgtgtgtgtgtgtgtgtgtgtgtgtgttggtgtgtgtgtgtgtatatgtgtgtatgtgtgtgtgtgtgtgtgtgtatgggggggtggttattaattttaattaattatgaaaatgtagagttttttattttttgatgtttttataaagaaatttttattggatgagaaattatatggtttttgagttaatattgtagttatagtgtgggggaaattatttaattaaaaatatatttttttatttgtttatatgatttttttagaagtatttaaaaagttgatattgatttttttggtttgttaattttgtttttagttttaaatatttttaattatattgaaggtttttttattaatttgaaggagaaaaaaaggagatttaaatatttaaattatttttaaatagttatttttttgtatttttttgttttattttttttttaaataggggtttttatgtgagtgatatattttatatttttgattttgtaaagttaggtataaatgataaggagtggttttaaataataataataataaaatttaatttgggattatataatatttaagtagagtagaagatttaaataaaattgtaatttatttatttatttttttttaatttaatttaaaaaaaaaaaattttttatttgtatttaaatagtgtgtttttaattatagtagttggggatgtatgaggttgaaatgaaattagtagttattattagttttttaattttgtggtgtttttgattagtattaaattagttttttagttttaataaagattttatagtaagtagtgggttgtaaataagatagtgtgatttgtttttaatatttttttttttgttaa

SEQ ID NO: 49 - DNA, 4324 bp, Artificial Sequence
  chemically treated genomic DNA (Homo sapiens)
gttttttagtattattattttaaaggtatttttattttttttattattagggaaggagtgtgtagttttgatttagttttttagtggagtaaagggaatttagaggaagggggatttttgtagaaattgttagttatataagtaagttttttttggttttttgttttattaaaagtgaaaaattgtttataggagtgtttatgttttttgtttttttatgtattattagagttaagaggggattttgttagtaaggtattttttgttttgttttgtagattatagtttttgatttttattttattgtttgtgtaatgtgtagaattggagtttaaagtagtgggtttaggattattttttaggtttggtgggtttatagattttttttttggttgggaagaggggtttttgtgaaagtagagtttgataagttttagtattgttatggttaagattattaatattattattgttgtgtttataaatatgaagattatggtagaggaggagttgaaagtttgaggagtggtagaggaagttgtagaattaaatttggaaattatgttttttgatggggtgatagtggtttttgatttggtttgaagggatatttgaagggtagatattgtgttttgtgatttttattgaggaattttaggaatagatgttattgaattgttttgtttagggataagtggtgttttttttagttttttgttgattttgattggttatgttttttgtggtatggggttggttgtagtggttggtgggtgtttggtgggtattttggtttttttaagggttggttgtttttttttattggttatataagagtggttgtttttttttagtttgaagtttgtagtatatttgtaggtaaagttttttaagttgtttaggtagttagggagttttgtgtatttgttagtatggaggtattttttggggtagggatataatatattgtttgagagtttgttttagtgagtgttgattttgtttgtgatgtaagtaattgagattgggagttgtttttggtagagtgtatttattttggttttaggtggattgaagtttagagtggtgttgtgtagttggaagggtgtgtgatagtttaagttagaggtggttttggggtgtggtgtaggatataagattttaaattggtatttgtataggtagttgttggtgtgtaggtggtattgtatttttttttagtttgtgggtttgattttattggtggtttggagtattgtgtatttttgtgtggtgtaggagtgttggggtttttttatttattgtagtgtgttgtttttgagattgttggggttggaggatagttaggagaaattttgtaaaggtttgttttttagggtgtagtgggaatgtttgtgttttagtgtgatttagaatagtaggtttttggagttttttttgggttttgggtttgtttgtaggagtgtgagtatagtgtgtagtttggtgtttgtatgtatggtgttgagtgttttattttgtaggatgtaggtttttttggttgtttgttgttttatggtagtgtggtgtaggttgtagtaggtttttgaggttgagtagttagtatggttggtagtggggtgtttgttgttgtttggtttgggttagagtgtttgttagaggaggtatagggtgaatgttggttttattttttgaggttttgtatgtagagttgtttttaatttggatttgttttgtttgaggatgtagagttgtgtttggagtgtggttattgttttttatagttggtttttttaatttggttttttttttttttttttttgtttttgtttttgatggattttttaattgttaagaatttttttgtgggtttagtggttaatagttttttttaggttgtgataggaaatgtgtgtggagtgttgttaggtttggtgtagttttgagttattttggggttaggaatatagttggtgttgggtataggggatgtagttgattagaaggttaaatattttgtttagagtaagaggagaaatttgttattgggatgaagtgtgtggtttttttttgtttagggagttttattaggattgtagaatttataatatgtaagtgaatataggtaggaaggatttgagaaaggaattggtttatgattataagattatgtttgtttattgtgtttttgtttggagttgtggagttagtgttagaataatttgtagatggttttagtgtttggggggtttgtgtttgtgggggaaaaatatgttgtgaaataatttagtaattgtttttgttattagaggtagtattatttaattgtatatttttttatgggtttttgtttttttattatgttaagagattttaggagttttaattattaaagaatttggagttgtttgggtattttaaatgggaaattttgttttttttattagtatttgttttagaaatttattttttatttttatgtgtttttttttgagttagattatattgatttattatagaaaggaaatgtatttttaggattaaatgaaaaataatgattatagattttaatagttaggttgttagttttttttgttattgtattggtttaaaaattttttaagtttataggttatatataaatgagtttgtggttttataaatatttgagaataattgttttatgtgtgattttagttttgaattattttagtattatttttttttatgattgagtggtagtatttataatagtaagttgtaaatattttttttaaggaaaattagagttttttaagaaattaaaatgtttattttattataatgaatattgtatattgttaaaaaatattttgtaatttgaaagatgggtgagttaatttttttagaattttagtgggtgttttgttttaatataaatattttaatttagtgggaagtggtaaggaattaaagatgaataaagaagtaaaggttaaaaattgtattgttatgaaaggattttttgttagtaatttagataatttagtattagtttagaaaatgtatattttattttggtttataatggttaaatatgttgttattagaaatatatagagagttttagttaagtttttttagagatgtttgatgtttttaaatatttttaattagaatgaaagttgttattttatggataatgtatataagtttattttgttttattgtatttaggttgatgaggggtgggagggaaggttttaggattatatttgtatgtttttattttatttttattataatttttatttttttttttttttggaaattttatgtattttaataaataatagtaagtttatgagttattattatatttattttgtttttgttgagtatggagttttgtattaggattttttttttgttttattttttaatttaaagaatattttttagttttttttttagatgtttgagaattattttaaatgtggttttgtgtttaaattaggtaatttagtgttttataagaaagaaatatgaaaatttagaaattaaattgaatggtttttaaaaaatatttagttatttgggttagttttttatagattattgtaattttatgattgtgtttgtaaatgtgtttatgtagtgtaatatttttaataaaattttttttaaatttaagtagttaatggaaattttttagatagttttaaaaattgtttgggatgagatgaggtgtttatagtaagaaagaatgaatagttggaaagtttaagtaaatatatgattttattttttgatattttgtttaggggagtgggattatagtagagaatatattggttataatgattatatgagagtattgattatgattatgattatattatggaatgatataagagttagaaaaaattagtttaaagtaggatgtaaatagttttgtaattagtttgaaatagatagtttatttgattaaattagaaatggaggaaagtttttattttttaataatatttattaagataataatatagaattattttatttttattggattttaaatgtttaaaaattttataatattaaatgtgaatttattggtttttttatatgttatagattagagtaattattttggaaaaatttgatatttttttttattaaaattgaatatttgtaaattttagtatttttatgataaggtataaaattaagagaaatttttgtatatgtataatagaagatatgtaaaaaatgtttatagtgatattatttatattaataaaatgttgaattaattaaaatatttaaaaatagtataaaaataaat

SEQ ID NO: 50 - DNA, 4324 bp, Artificial Sequence
  chemically treated genomic DNA (Homo sapiens)
gtttatttttatattgtttttggatattttgattgatttaatgttttgttaatatgaatagtgttattataaatattttttatatattttttgttgtatatgtgtaaaaattttttttagttttatattttattatggaagtgttagagtttgtaaatatttaattttagtgaaaaaaagtgttaaatttttttaaagtggttgttttaatttgtaatatgtaaaagagttaatagatttatatttggtattataagatttttaggtatttggaatttagtgggggtaaaatggttttatattattattttaataaatattattaaaaaatagaaatttttttttatttttaatttggttagataaattgtttattttaaattaattataaaattatttatgttttattttgagttaattttttttaatttttgtgttattttatgatatggttatggttatggttagtatttttatatagttgttatggttaatgtgttttttgttataattttatttttttagatagaatgttagggagtgagattatgtatttatttaagttttttagttatttatttttttttattgtagatattttattttattttaaatgatttttaaagttatttaagaaatttttattgattatttaagtttgaaaaagattttattaaaaatattgtattatatggatatatttataaatatagttataagattgtaatggtttatagagagttggtttaagtgattaagtattttttaaaaattatttaatttgatttttggatttttatgttttttttttataagatattaagttatttaatttaaatgtaaagttatgtttaaggtgatttttagatatttgaaggaaggattaaggaatgttttttaaattgggaaatagggtaggagagaaattttagtgtaaagttttatatttagtaaaagtaaggtaagtatgatgatgatttataggtttattgttgtttgttaagatatatggaatttttaggaggaaagaagaatgagagttatggtaaaaataagatggaagtatatagatgtgattttgaaatttttttttttattttttattaatttgaatgtagtaaaataaagtgagtttatatgtattatttatggaatggtaatttttattttgattaaagatatttaaaagtattagatatttttaagagggtttagttgaaattttttatgtatttttgatggtaatgtatttggttattatgaattaagatagaatgtatgttttttaaattgatattgaattgtttaagttgttaataagaaatttttttataatagtatagtttttaatttttatttttttatttatttttaattttttgttattttttattgagttgaaatgtttatattaaaataaaatatttattggaattttaaagaaattggtttatttattttttaaattataagatattttttgatagtatataatatttattataatggaataaatattttaattttttaaggaattttaattttttttaaaggagatgtttataatttattattataaatgttgttatttaattataggagaaaatgatattaaaatagtttaaggttaaaattatatatagggtagttgtttttgaatatttataaggttatgaatttatttatgtataatttataaatttgaagaatttttgaattaatatagtggtaaggaaagttaataatttaattgttaagatttatggttattattttttatttagttttagaaatatattttttttttgtaatgaattaatatggtttaatttaaagagaaatatgtggaagtgaaaaataaatttttaaagtaagtgttgatggaagaagtagaattttttatttaaaatatttaaataattttaaattttttagtagttaggatttttgaaattttttgatataatagagaagtaaagatttatagagagatatgtggttaaatagtgttgtttttggtggtaaaagtagttgttaagttgttttataatatattttttttttataggtataggttttttaaatattggagttgtttatgaattattttgatgttaattttatagttttggatagaaatataatagatgggtgtggttttataattataagttagttttttttttaagttttttttgtttatgtttgtttatgtgttatgggttttgtggttttgatgaaattttttgaatggagaaaaattatatattttattttagtggtgaatttttttttttgttttaagtagggtgtttgattttttagttgattgtgttttttgtatttggtgttagttgtgtttttgattttagaataatttagggttgtattgggtttggtagtgttttgtatatattttttgttgtggtttaagggaaattgttggttgttgggtttgtggggggatttttggtagttggggggtttgttgggagtgagggtggaggggaagggagggggaattgggttggggaagttagttgtagagggtggtgattgtgttttagatatagttttgtgtttttgagtgggatagatttaagttgggagtagttttgtgtgtggggttttagagaatgaggttggtgtttgttttgtgttttttttggtaggtgttttggtttgggttgggtggtggtgaatattttattgttgattgtgttggttgtttggttttgggggtttgttatagtttgtattatgttattatgaagtggtaggtggttgaggaggtttgtattttgtgaggtggggtgtttagtattgtgtgtgtgggtgttgagttgtgtgttgtgtttgtgtttttgtgggtaggtttagggtttggagggggttttaaagatttgttgttttgggttgtattggagtgtaggtgtttttattgtattttggagaatgagtttttgtggggttttttttggttgttttttgattttggtggttttgaaagtgatatgttgtagtgggtggaggagttttaatgtttttgtattgtgtggagatgtgtggtattttaggttattggtggggttgagtttgtaggttggaaggagatgtgatgttatttgtgtgttaatggttatttgtgtaagtattagtttgaggttttgtgttttgtgttgtgttttggggttgtttttaatttgagttattgtgtgtttttttagttgtatagtgttgttttggattttagtttatttgggattgaggtgagtgtgttttgttggggatagtttttgattttagttatttgtattgtggatgaaattggtgtttgttgggataaatttttgggtgatgtgttgtgtttttgttttgggaggtatttttgtgttggtaaatgtgtagagttttttaattgtttagatgatttgggaggttttgtttgtgaatgtgttatgggttttgagttggggaaggatggttgtttttgtgtgattagtggggaaggatagttgatttttggggggattggggtgtttattaggtgtttgttggttattgtaattagttttgtgttgtagagaatatggttaattagggttgatgagaagttgggagagatattatttgtttttgaataagataatttagtaatatttatttttgagattttttgatggggattatagagtatgatgtttattttttaaatgtttttttaagttgagttaaaggttattattattttattagggagtgtgatttttaagtttaattttatgattttttttgttattttttaggtttttgattttttttttgttgtggtttttatatttgtgagtatagtagtagtagtgttggtgattttgattatgatagtattggggtttgttaagttttgtttttatgaaagtttttttttttagttaaggaaggagtttatgggtttgttgggtttggagagtgattttgagtttgttgttttgggttttagttttgtatattgtataaataatggggtgaaagttggggattgtgatttgtgggatagagtagagggtgttttgttggtggagtttttttttggttttagtgatgtatagggaaataggggatatgggtatttttgtgaatagttttttatttttgatgaaatggggaattaagaggaatttatttgtgtaattgataatttttgtagaaatttttttttttttaaattttttttattttattgaggagttaaattagaattgtatattttttttttgatgatagaggaagtggaagtgtttttaggatggtgatattgggggat

SEQ ID NO: 51 - DNA, 5683 bp, Artificial Sequence
  chemically treated genomic DNA (Homo sapiens)
ataatgttaaatgtaaattttttgttttgtttaatgtttttattttatggttggtaaataaaaataataaaatagtattgataataataatagaaataattaattgaagttgtagtttttaatttttttaaagataataggttaaagtgaggtttttataataagatgttagttattaggaaggaagttagggaaaatttttttttagggggtaattgatttttattggtttaatattgtatgtagtattgagttaggaggttttatggagaagtgtttgtttttttttttttgttgttagaataaagtttataaataattttgttttttttatatttttggagttagttagttagggtttttatttatgtttaggggattagatttggatatttgtaaaagaattgaatatagatggatagttaagaaaaaaataaatgttaagattattattatttatagtttaatgatttagtaatttaaaaaaatttaagaataataaaataatttttaagaaggataagaattttaaaatatgtagtttagaaaattaaattttttaggtttagagtttaagtaaaagaaaatttgagataatgaagtttggaatattgggtttgtattttgtttttgattttgtgtttttgggtaagatattgaatttttttattttagatttattttatattttaaggagggtgtaggattttgtagtttttttagtgatggtatattattaattagaattttaattagttttatttttattattttagtaaaatgatgttaaaaattagattttgtgatatgagagaagaggggaaattaattatagattataaagaaattgtgggatttaagtttagggtgaggtgttttattgaatttttagggttggttatagtatttgttatatagtaggtatttaataaatgatgtgtaatgggtggttagattgatggaaaggtaggtttttttagtgatggtaaaggatttggggtaaaagagatttgtggttgagttttgatttttatatattagtatattgattagatgaagttataagttttaatttttttttgtgtaaaatggagataatattttatagggttatgaggattaaataagaaaatgtttagtttagtgtttaatatataggaagtatattgtaaatattagttattattattattaatattgtgattatattttttatttaaagatttttttgaggagtagggggtatttagagataaaaagtttgtaggtgggaaatttgttagttttttagggtgttaggtttttgtggaattttgtattttttttttgttttagtttttaagaatagaaattttttagggatttttggtgaggtagttgtgggaagatgaggtgtagaagtaagttgggatttgtgagttttaattttggttttttttgtgttgagatttaagtggattttgtttggtttgtatgtgttattgggggaaatggatgtgggtttgagtgtggtaggtgtgagggtgttgttttggggttgattattttgtggggatattgtagttgttatttttttttttgtaggtgggtaggggaagtggtggttaaagtgggagttgattgtttagtatagtttgtttgagtgttgattaggaaagtttaggttttttttaaattttgttgttagatttggtgatgtatttgtatgtatttaaggtgtttgtatgtagaatgttattatagaatgtagttattttttttaatggtttgggaaattagaggtttttttagttatttagggtagaggaattttttttatttttatgtgatattttttgatttagaagaattaatgttagattttttttgggtttttttatttatagttatagttttttttttgtttagttaaaattgaggtaggtaggaaaatattattgggggtataagtttattagtgtgtaaatgtatttttatgaagtgtgtttttagggagttattaaaaattgattttttaattatagaaatagatgagattttgagaatattgagaagttgttttttgtaaagtaaatttgtaatggtttttgatgaaggggggttgggggtggggagaagtttagttgagagaggagtttattttatgttatatttttgtagttgaaaagttgtttaattattgttaattgttttttgtataagagttttgggaagattttagaaataaggtaaatgaagattttttattgttttttttgggttgttgtttttggaagttgaagttttagtatgtagagtagtaggagagggttatttttaggtaattttattgagtaaaataaattatttaatggtataatgttttggtttaaaaaattggaatttattagaggtaaaaatattttttaagaaattatggatattttgtgttttatttatttttatggtagtagagtatttgtattttgagttatttatatagatttatgttttgtattgtttttattttttttttttttgaagtaaagtttttttttaagaaggtggttagaaagtggattttattgggggaaaaagaaaaatgaaatgtaaattagtttggtattgtttgtgttttttaaaatgtggtgggataaggttattgagtttatagttaatttttttatgtatataaaatgtatatatatgtatatatttttatatatataaaagaatttatatatatgtatatagttatgtggagttttgaagtaattttttatgtttttgttttttttaagttttttaggtggaggtagttataagtattataagttgttttagtgattattagggatggaaattgttaattattatgtttttttttatttttaggggttttttggtttgtgatataagaggttttggtattggtgtttttttagaattggtttagaggagttagtttagagtgtgaggttgggtttgtattgaatgtatatattgaggtttattagatttttttgattttagtgaagggtgttgattgttgtgttgttagaggttagtaagttttttgtgtgtagttgatgagttttagtaatttgttatttgggtgtttttttttaaattttgggagtaaattgggaaaataaaaaaatttttatgtttattggttttttttttttttttaatttttttttttgatttgtttgtgggagtttttttttttttgttgggattataatgtgatgtgtaattgtttgtgaatgaataaaagttattggtaagtagggagatggggatagattgttgatggtagattgagggtggtagtaaaggtttggtttttaaggataatggggagttgtttttttttatgtttggtttttatggttttttttgttttttaggtaaaatgaatgtttttttatttattatttgtagagtatttttaggtgtgtgtagaatttgttgatgaaatttattagtgttgattgggtagttttgtggagttatttgaggttttttattgtggtttttgtttgtagaatttaagtatttatataatgtattagtatggaatttagtatttggtggggatattgtgtgttaagtttggtgtggttaatgttttagtggtttttttatttggtagttttttaggattatttttgaggaggtattggagttgggttgtaggtgtatgggtaaagaatttagtattttatttaagtattttgttttttttggttgtttttgggaggttatgtttaaaaatataaaaataaaaataaaaataaaaataaagggaggtggataaagttttggtgggtgaattgaagttgggtttatgtgattttgaagttggagaaataaatttaatatgaattttgtttttttggtgggtgttgggattttgttgttttttatgttaattgttggaagttttgtatttaatggttataggtgtttaggagtgtagagaggttttgggtttaaattattggtgtgtagggattggatttgtgggtagtgatttttttaatttttttttttttgttttatatatatatttttgtgttggttgaaagtatggaggatttagggtatttgaaaaaagaggggttgggtgtggtggtttatgtttgtaattttagtggtttgggaggtttagaagggtggattatttgaggttaggagtttgagattagtttggttaatattagtttggttaatatggtgagattttgtgtttattaaaaatataaaaattagttaggtgtggtgtttgtaatattagttatttgggaggttgaggtatgagaattgtttgaatttgggaggtggaggttgtagtgagtttagattgtgttattgtttttttgttttgggtgatagagtaaggtattgttttaaaataaaataaaataaaatgaaagatttggttaggaaagaatttgtaggtatttgaggtgtttgtattttgtaaagtaaatgtaatttttttattaagttgaagttttttatatttatttttttagaggaaggtggtttaatttagaaattttttttaagaggattttttattgaagattattgtgaagtgttaggaatttgttttagttttgataggtgtaggattttttgtgttgttatattttgggattttatttttttaaataggttatttaaaagttagtagtgtaattgggattttgtggtgataaagaattattgtgtagaattttggagttgggagttggtttgttttttttttaaagaaattgggattttgtgttttttttgttgttagtgtagtgtgttagtggtgtttaattagtgagttttttgggtttgtgatggtttttggttttgtttttttgatggttataaaaagttgtagtgaagtttgtatttttgagtattgtgtgtggttttgtttttggtatggtttttaggtgtgttttttttttggttgtttgtagtattggttttattgtttttgttgttagttattggttttttatttgttttattttttattgtggtttggttgagttggttgttaggttttgttgtttttttttgtttttttttttttttagtggttgtattttgtgttgtattttatttggtttgtaggtgagtagtagtgtagtatttttgtttggtgagtttaatttgtttagtttggtttttgttggagtggtattggtatttttttaagatgtttttttttttgtaggatgaagaattttatgttggaggtggtgtttttattattggagaagttgttttttatttttaattttatgttttttagtttgggtgttgtgggtgaagataaagggaggaatagtttttatgaaattagttttttttattgaggtgatgtgttggaggtgttttggatttatttgatttattatggtatttatttaggagataattgtgttgtttatatgatgtttgatattttgttggttttgatagatgatatggggtgtatgtagaaggtggtttttaataagtgttttattttgggtgttattgttaaagtggttagtatttgtgtggatatagtggaggattttgtttatggagttaatattttggttaattatttggatgagtttttttagaaaaaggtattgtttaatgaggaggtggtgtggagggttgaaaagttgttgggttttat

SEQ ID NO: 52 - DNA, 5683 bp, Artificial Sequence
  chemically treated genomic DNA (Homo sapiens)
gtaaagtttagtagttttttagttttttgtgttatttttttgttgagtagtgtttttttttggagggatttgtttaggtgattgattaggatgttagttttgtaggtgaagttttttattgtgtttatgtggatgttggttattttgataataatgtttaggatgagatgtttgttggagattattttttgtgtgtgttttatgttgtttgttagggttaataggatgttgggtattatgtgggtaatatggttgttttttaggtagatgttatagtgggttaggtgggtttggggtatttttagtatgttgttttggtggaaagagttggttttataaaaattgtttttttttttgtttttgtttgtggtgtttgaattaaagagtgtgaagttggagatgaggagtagtttttttagtagtaaagatattatttttagtatggggttttttattttgtagggaagagggtgttttggagaggtgttggtgttattttggtaggggttgggttgggtaagttaagtttgttgggtaggggtgttgtgttgttgtttatttgtaggttaggtgaggtatggtgtaaagtatggttgttgaggagagaggaaggtaaaggaggatagtgaggtttggtgattggtttagttaagttataatggggaatgagatggataaggaattggtggttgatggtggggatagtgagattagtgttataagtagttggagaaggagtgtatttgggggttgtgttgggggtagggttgtgtgtggtgtttggaggtgtaggttttgttgtgattttttatggttgttgagggggtggagttgaaggttgttatagatttggaaagtttattgattgggtgttgttggtgtgttgtgttagtggtggggaggatgtgggattttggtttttttgggaggggggtgggttgatttttagttttagggttttgtatagtgattttttattgttgtgggattttggttgtattattggtttttaagtggtttatttagggaggtagagttttaaggtgtggtggtatgaaaggttttgtatttgttgggattggggtgagtttttggtattttgtggtagtttttggtggaaagtttttttgggagagatttttgagttggattatttttttttaaaaggatagatatgagggattttggtttaataaagagattgtatttattttgtaaagtgtgagtgttttgaatgtttgtagatttttttttgattgaattttttgttttgttttgttttgttttgagatagtgttttgttttattatttagagtaggagggtggtggtgtgatttgggtttattgtaatttttgttttttaggtttaagtgatttttgtgttttagttttttaagtagttgatattataggtattatgtttggttaatttttgtatttttagtagatatggggttttattatgttggttaggttggtgttggttaggttggttttgaatttttgattttaagtgatttgtttttttggattttttaaattgttgggattataggtgtgagttattgtgtttagtttttttttttttaaatgttttgaattttttatgtttttagttggtgtgagggtgtgtgtgtagggtgggggggggggggttgggggggttgttatttgtgagtttagtttttgtgtgttggtgatttgaatttgaggtttttttgtgtttttaggtatttgtggttgttgagtatgaagtttttaatggttggtatgaaaaatggtggggttttaatgtttgttaggaaagtaagatttatgttaagtttatttttttggttttagggttatatggatttagttttagtttatttattgaaattttgtttgtttttttttatttttatttttatttttatttttatgtttttaagtataattttttggagatggttaaggaaggtgaagtatttggatgagatgttaagttttttgtttgtgtgtttgtagtttgattttaatgtttttttgagggtggttttagggagttgttgggtgagggagttgttgaagtgttggttgtgttaggtttggtatgtgatgtttttattgggtgttgagttttgtgttaatgtattatgtaaatgtttaaattttgtagataaaggttataatggagagttttgggtggttttataaagttgtttagttggtgttaataggttttattagtagattttatgtatgtttgagggtattttgtggatgatggatgaaggaatatttattttatttggaagatgaagggggttatagagattaggtgtgagggaaaatggttttttattatttttggaggttgggtttttgttgttatttttaatttgttgttagtgatttgtttttgtttttttgtttgttggtgatttttgtttatttataaatgattgtgtattatattatagttttagtaaagaggagaaaatttttataaatgagttgaaagaggaagttggagaaggggagagagttagtggatgtggagatttttttatttttttagtttatttttaaaatttaaagaaaagtgtttaggtggtgagttgttgaaatttattagttgtgtatagggagtttgttagtttttagtagtatagtagttagtattttttgttaaaattgggggagtttgatagattttggtgtgtatgtttaatgtagatttgattttatattttgaattggtttttttgggttagttttgggaaagtgttaatattgaagttttttgtgttatgggttaaagggtttttggagatgaaaggaaatgtgataattaatggtttttgtttttggtggttattaaggtggtttataatgtttatgattgtttttatttggggaatttgagggagataaaagtatggagaattgttttagggttttatatagttatatatatatatatgaatttttttatgtatataaaaatatatatatatgtatatattttatatatatgaaagaattagttatagatttaatagttttgttttattgtgttttggaagatgtaagtagtgttaagttgatttgtgttttattttttttttttttttggtggggtttattttttggttgtttttttgggaaagggttttattttaaaaagaaaggaggtgagagtgatatgaggtatgaatttgtataggtggtttaagatgtagatattttgttgttatggaaatgaatagggtgtggagtgtttatagttttttgaaggatatttttgtttttgataaattttaattttttaagttagaatgttatgttattaagtgatttattttgtttagtggaattgtttgaaagtaatttttttttgttgttttgtgtgttaggattttggtttttggaagtgatagtttgaaggaggtagtgaaaagtttttatttgttttgtttttgaagtttttttagaatttttatgtgggaagtggttagtgatgattaggtagttttttaattgtaaaaatatagtgtggaatgagttttttttttggttggatttttttttgtttttgatttttttttgttaaggattattgtaaatttattttgtaaaaggtagttttttaatgtttttaaaattttatttatttttgtggttgagaggttagtttttaatggttttttggaggtatattttataaaaatatgtttatatattaataggtttatgtttttaataatatttttttatttgttttaattttagttaaataaagggaagattatagttgtaggtggaaaggtttaagagaaatttaatattagtttttttaaattagaagatgttatatggagataggagaaatttttttattttgagtagttggagagatttttggttttttggattgttaagaaaggtggttatattttgtgataatgttttgtgtgtaaatgttttaaatatatgtgaatgtgttattaggtttggtggtgagatttagaaagagtttggatttttttggttaatatttagatagattgtgttgagtggttgatttttattttggttattgttttttttatttgtttgtagaagaaggaatgatagttatagtgtttttgtagggtggttggttttggggtagtgtttttgtatttgttgtgtttaggtttatgtttattttttttagtaatgtatataggttaagtaagatttgtttgggttttagtgtagaagaggttgaaattgaggtttataggttttagtttatttttgtattttatttttttatggttattttattagaggtttttggagagtttttgtttttaagaattaggatagggaagaggtgtagagttttatagaaatttaatgttttagaaggttaatagattttttatttgtaggttttttatttttggatgttttttgttttttagagaagtttttggatggaagatatgattatagtattagtaataataataattaatatttatggtgtgttttttgtgtattaggtattgaattaagtatttttttatttaatttttataattttatgaggtattatttttattttatataggaagaaattgaagtttataattttgtttagttagtgtgttaatgtgtggggattaggatttaattataggttttttttgttttaggttttttattgttattgggaaggtttgtttttttattagtttaattatttattatatattatttattgaatatttgttatatggtaggtgttatgattaattttagaggtttaataaaatattttattttaaatttagattttataatttttttgtaatttgtaattaattttttttttttttttatgttatgaggtttaatttttaatattattttattgggatagtgagaatagagttggttaaggttttgattaatagtatgttattattaggaaggttataaaattttatattttttttagggtgtaggatgaatttggggtggggaagtttaatgttttatttaagggtatagagttaggagtagaatgtaggtttagtgttttagattttattattttagatttttttttatttgagttttaggtttgagaaatttggttttttaaattgtatgttttaaaatttttgttttttttagggattattttgttgtttttggatttttttagattattaaattattgggttataaataatgataattttaatatttgttttttttttagttatttatttatatttagtttttttataaatgtttaggtttggttttttggatataaataggggttttaattagttaattttaaaggtgtggggaaaataaagttgtttgtgaattttgttttgatagtagaggaaaagaagtagatatttttttatggagttttttaatttagtgttatatgtagtgttaggttaatagggattaattattttttgggaggagattttttttggttttttttttggtgattagtattttattatgaggattttattttagtttattgtttttagaaagattaaaagttgtagttttagttggttgtttttgttgttgttgttaatgttgttttgttgtttttgtttgttaattataaaataagaatattgaataaaataaagaatttatatttagtattat

SEQ ID NO: 53 - DNA, 2347 bp, Artificial Sequence
  chemically treated genomic DNA (Homo sapiens)
ttgaggtttaagttagggaggttgagattgtagtgagttttaattgtgttattgtattttagtttgggttatagagtaagattttgtttaaaaaataataagaaaggtggaggaaataggtagagattagaggaaagttatggtttttttttgattattttgagatttttttaattttattaatttttggagagttttttatttgttttattttatagattgggaaattgagtttaggggtatttagattatttgaggttttagttggagatgaagagatggatttaaattattttttgtggagtatagttttgttttttttagagtggagattgtgttttagggttttttttatttgtattaaggttggtttttttaggttttattttttttatttgtaaaatgggtttttgtgagtatgaaggagggtttggtttgtagtgagtgttgtttatttgttggttagtgtgattagttattgttgttgttttttagtggtttttgtttggtagttgttggaaaaatattgagggagggagatatagggttggggaggtgaaaagttggatatagatgtttttagttttttgggattaggaatagatggaggttgggtgttttgaagtggagtagggaggattgtttggaggagggatatttgagttagaatgtatagaattatagggtatttttggtagaggttatagtagaggtaaaagtttagaggaggtgttttggggattattaagatggatatagtgggtttgggtttttgtggggtgatgggttggggttttgagtgttaggttaaagggtttggttttttttgagggtggtagggagttatggtaggtgtgtgagttggaggggtattttagataaaggtgaagtggtatttttttttttattgaagttataatttgatattttttttgaagttttttatattttattttttttttgttatattttggtaagtttatttttttttttttgtttttaggtttgttaagaggttttgtgggttttttatggttttatttagttgttttagaagtttgtttgagataagtttttagggttgttttatttttaggtgttttatagatttgggggtgggtgaagtaggaaggattgagttatgagggttttagaaaatatgatgggaggaattatagtatttttttatttttttagtttttgtttttttagggagagagatttttagtttgaggaggagggttgagtttttttttatgtggtaagagattttaatgttgttgaggattatttaaagagggtgttgaaggatgtataggagttagttaggagataatttatttgttaatttaataaatttataggtattatttattaataagaataatttttattatttaattaggattttttaatgtttttgagggattatttgaggatgtttaattattatttttatttgagatagggttttattttgttatttaggttggagtgtagtgatataattatagtttattgtagttttaattttttagttttaagttatttttttattttagtttttgatatagttgagatataggttaatgttattatgatgtttggttttttttttttttttttttttttttatttttgagatagagttttgtttagttatttaggttggagtgtagtggtgtgattttagtttattataatttttgttttttgagtttaagtaatttttttgttttagttttttgagtagttgggattatagatatgtattattatatttagttaatttttgtatttgtagtagagatggggttttattatgttgtttaggttggttttaaatgtttgattttaagtgatttgttggttttggttttttaaagggttgggattattggtgtaagttattgttttttgattatttagtttttttttttttttttttagtttttggtagaaatgtggttttatgtttgtattttagtattttgggaaggttgaggtgggtagattatttgaggttaggaatttgagattagtttgattaatatggagaaattttgtttttattaaaaatataaaattagttgggtatggtggtttttgtttgtaattttagttatttgggaggttgaggtaagagaattatttgaatttggtaagtggggtttgtggtgagttaagattgtgttattgtattttagtttgggtaataagagtgaaattttgttttaaaaaaataaaataaaataaaaatataaaattagttaggtatggtggtatgtgtttgtaattttagttatttaggaggttgaggtaggagaattgtttgaatttggtaggt

SEQ ID NO: 54 - DNA, 2347 bp, Artificial Sequence
  chemically treated genomic DNA (Homo sapiens)
gtttattaggtttaagtgatttttttgttttagttttttgagtagttaggattataggtgtgtgttattatgtttggttaattttgtatttttattttattttatttttttgagatagaattttatttttgttgtttaggttggagtgtaatggtatgattttggtttattgtaaattttgtttattaggtttaagtgatttttttgttttagttttttaagtagttgggattatagataggagttattatgtttggttaattttgtatttttagtagagatggggtttttttatgttggttaggttagttttgaatttttgattttaagtgatttgtttattttggtttttttaaagtgttgggatataggtatgagattatatttttattaaaaattgaaaaaaaaaaaaaaaaagttggatggttgaggggtggtggtttatgttggtaattttagttttttgggaggttgaggttagtagattatttaaggttaggtatttgagattagtttggataatatggtgaaattttatttttattataaatataaaaattagttgggtgtggtggtgtatgtttgtaattttagttatttaggaggttgaggtaggagaattgtttaaatttaggaggtggaggttatagtgagttgaaattgtattattgtattttagtttgggtgattgagtaagattttgttttaaaagtaaaaaaaaaaaaaaaaaaaagaaaagttaggtattatggtggtattggtttgtgttttagttatattagaggttgaggtagaaggatagtttgaaattgggaggttgaggttgtagtgagttatgattgtgttattgtattttagtttgggtaatagagtgagattttgttttaaataaaaataataattaaatatttttaaatgattttttagaggtattagaaagttttgattgaatgatgaaaattgtttttgttgatgagtgatgtttatgagtttgttaaattaataaatgggttgttttttggttaatttttatgtattttttaatattttttttagatgatttttagtgatgttagggttttttgttatatggagggaagtttggtttttttttttgggttgaaggtttttttttttgagaaggtggaagttgaggaggtggggaagtgttgtggttttttttgttatgttttttggggtttttgtgatttgattttttttgttttatttgtttttgagtttgtggggtatttgaaagtggggtagttttgggaatttattttagatgagtttttggggtagttgggtggggttataaggggtttatagggttttttggtaggtttagagatggagggaaggaggtgggtttgttaagatgtggtaaggggaaggtgggatgtggggaattttagagggagtgttaggttgtgattttaataaggggagaaatattattttatttttgtttggggtatttttttagtttatatatttgttatggttttttattgtttttggagaaagttaggttttttagtttggtgtttgaggttttagtttattattttatagaaatttagatttattgtgtttattttggtggtttttaaagtattttttttggatttttgtttttgttgtggtttttgttggagatgttttgtaattttatatattttagtttaagtgttttttttttaggtagttttttttgttttattttagggtatttggtttttatttgtttttgattttaaggggttaggggtgtttgtgtttagttttttatttttttagttttgtattttttttttttgatgtttttttagtagttgttaggtagaggttattggggaataataataatgattaattatattggttagtgggtggatagtgtttattgtaagttaagtttttttttatatttataaaagtttattttgtaggtgggaaagatgaggtttgagagggttaattttggtgtgggtgggggaagttttgaggtatggtttttattttggaaggggtaaaattatattttataaggggtggtttgaatttatttttttatttttagttggggttttaggtggtttgagtgtttttggatttagttttttaatttgtgaaataaggtaagtgagggattttttaggaattggtggagttgggagggttttaggatggttaggagggggttatgatttttttttgatttttatttattttttttattttttttgttattttttgagtagggttttgttttgtggtttaggttggagtgtagtggtgtaattagagtttattgtagttttgatttttttggtttaagttttag

SEQ ID NO: 55 - DNA, 6709 bp, Artificial Sequence
  chemically treated genomic DNA (Homo sapiens)
atttttaaattttttaatttatagagggttggagagttggtattatgagtttttagtttttatgggtgagaaaagaggtgtttgtgtggagggtaggtgtgattttgggggttagtagagaggagaggttgtgggaggatttgttgtgaagggtgaggggtggtgttgggtgggatgggtgtttggggttgtgtagggtggtttttgggtgttgtttgggttgtttgttgtttagtattggtgtaggaagatgggtttgtgtagtgtttggtaatagtggtttgttttatgtttggaggtgattaagttttgagttaaaggtgttgggtttagttgggaagtgtatggtgatttagaatatggagtggagaaggttttaggggatatgaggttattgttttagtttttgggtttgtgttttgagtggttagggtgtgtatggatgggttttgggatgttagtggagaggtgataggagtttattattttatggttaagtgtgtgaggtttttggtgggtgggggttttttttggggtagggtagggggagagttaggtatgtttttaatgggttttttagtagaattgttaggaaagtggtttttaattttaggtatttttgtggtttttaggtagttgggtgattaaaaatttatttttgtttgttgtgaaatgggataggtggttgttaggttagagattgtgtttatgaagttttgtttggtgggttgggattgatgtggatttgggttttttttggaagtttgggaatttgtgagttttttagttttttgttttattttgtttgtttgaaaaaaggagttgtttgagaggaagagttaaggtttaaaaggttttaaatgaagagtatgtggtttgatgtggagtgtaaagaagtgagtagtgaattgaatttggtgggattgagattagaggtgtttgtatgtggtggttgttttgtgttttattaaagtaatttgttatttatgataattatttttgtaattattttggagtggttgtgatttgatgtttgtggtgttttagggtatgtttttattggatatagatattttagggtgttttttgatgttagtgttggtttagtgggtgttagtgttgtgaagggagggtggtgggtgtgaatgttttttttttttgggtttgttgtaggttttggtttttttattttgtttgattttggtgggtttgttatttattgaggtttttattggtgtttatgttgttttgagaggtgggataaatgtttggtgtgtggtgtggagtttgtgaaagtgtttgggggtttttattttttgtttgggagttttttttttggggtgggaagaggagttgtagatttgtttgaattttgttttatttgtttggttgtttttttttgtttggggtgggggtaggggtggtggatgatttaggtttggggttgggagttttgtttttaaaggtattattttgtgtttttttggaagtggtgtgttgttggggtgtttttgttgttgtagaggtttggtttgtggttttataggggtgtgggtttagggtttttagggagtaagtgagtttaggttttttagggggtggtagaggggaatttttgataattttttatttttttttttaggtggttgtgaggtttttggggttttagaggggtttttttttgttggtgttggttgttttgagtgtggttatgtagtttgtgtttttatgtgggtaaggggtggggatgttggagggaggttgttttggatgttggagtttttggtttttggttttgttgagtagaaaagttgaagttaaggaagggttgaggtttttttataagggtgtgtgtgtgtttgggtgttggtttagaagttgagaatgtgtgtattggggaagggttttttgtgttgagaagatagaggatttgttttagttgttttttgtatagagggtgtggaggttgtgttttagtttgaatgtttatttattggaaagagggtagtgttggggtttagggaagttttttgggaatgaatggtttttgttaagtggttttggattttttgggttttttgggtttatggtatggtgttgtgtgagtttttagtgtttattggttttttttgttttttgtgtagatgtttttaggtggggaggtatattggtttttttgggtagttttggttagtgttgttgtgggaaaggagagttagggtttgggatgggggatgagtatttttttgtttattttgggttttagtgtgtaggaggtaaatttgttagtatagataagatagtttgtttaagttgtattttaggttgggttagagaataaaattgagggttagaaggtttagaatgttggatagtttagtggtatttgttagggagttttaggtgtttgaaagaggtgttgtatttttggtgagtttaggatttatttttttggatttgtgttttggagtgtttgtgggtttgggtttaatttttgtttttggtaggtgttttttttttttgttgttaatattaggagtgttgtttttgtggtaatttattttatttttagaagtttgttttgggattgaagtgttagggttttgtgtgtttttttatgtattgttttttttagtgtaaagttttgtagatatgtttggttgaaaagttttagtggttttaatttttagattttgtttttgtgtttggttggaaaattatttgggatttggttgttgtttaaggttgggggaaagttttttttggaggatgtttattattattatttttttttaggtttatttgggtttaaataaatgttaaagtttaaatgaatttgagaaggaatagtgaggtagtggatgttgttattttgtggatgggagagttatgtttattgtaggtgtggatattgtattgataggtattgattattgtaaaattgtatttagtattaaatagaaatagttttgttttttaatttttatagaatgtttaaatttagtttagggagttagttggggtgttttaataaatatgtttttgagaattagtgatgttttttttataatgaaagttaattgttgtataataattgggttaaagaattttgttagtttaaattttaaaaattagtattgtattttgtttttaagtttgggtggtaagtattgaaggggagagggaagtagtgtttgtgtggaaggaagttttgttttttgtttaaatatgtgggatttgggtgtttatttttttagttgagagttttttgtaggtttttttttaattttttgtatttttttatttttattttatttgtggtgtttgggttttatttttgtttggtgttttttttttagggtgagtagaggtttttgagtgattggtttgttagaggtagttgtagagttggtgttttgtagggtagggtagggttgggttgttgggttggtttagtgtgtgtgggttttttttggttttagttagttgtgggagatgttattttgggtgatagtggtgagatgttgttgtttgtaatttttgggtgggtaggattgtttgttgtttttgtggtttttggggtagattttttaggagtttttttttttttttttttgtttgggggttgggattgtgttgtgtttatggagggaattgggtgtttttggtgtattggggttttagttgtatgattttagtttagattttaagttttagtggggtgtaggtgggatgggatgtgtttttaggagatgaggagattttggttgttgagttgttttttaaatgtgtagttttttaattttaggtgatatttgttttttggaggaatgagtgaaggttgtttaggtgaaagaggggtgggttttagtatttggatttttttttttagttttgttaattttaggtgtgtttatggtggaggtgatagaaggaaggtgtgttgggggatttaggttttgtaggtttttggttgttaatgaggtattgtttattgattttgtgttttgttttttatagtgtggggtttggtgttgtgttaggtttgggtgtggggtggagttaggttgggattggttgggggttgttttgtttggtgtttgggtttttgtgttggtttttggggaggagttatgataattttttttttattaaggtgtttgggttttttggttattgttaggatatattgtttgggtgtggttttttttgtttgtggagtggttttgatatttgtggtggtagtatttatgtttgtagagttgttgatgtgtgtttagtgatttggatagtaaggtttgtgtgtggtgggggtggtggtagatgtttggttattgtgattttgattttggatttattgtttgggggttggggggattttggatttaattggtgattgttttgggggatgttggatgttatgttgtggaaaataattgataatgttaagtatgaagaggattgtgaggtgagttggggttttggggtgtagttttgttttgttgaggatagtttgggaggtaggggttattggattgaggttggggatgagggtataggagttttggttttttggtgggatgggatttatttttttggatattttttagtttatttttgtggggttttttttttgtatagggtttttttttaaatagtttttttttgggaatgaggtttggaaagagaatggtaaattttatttatatagtttattgggtgtttttttaagtggtaaatagttttgttttttgtttttttggaaaagtgttttgtttgtaatttttagatgtggtttttatgtatgaagtttttgtttaaaggggttagatgaggttatttgttagtgatattttggtggatatttttttaaggttggtttgttatttgttttgttatttttttggggaagtatgaaaataattgaagtttggtttttaaaagaagtgggggttggggagtggtggtgggggtgtttgaggttagatggggttgtaagagtttgtgagtgttttagtttgttggataggttgagttagagttttggagagtgggagggaagaaggaggtggtgagtgggaagaggaagaagatgtaggtagtgttaggtgagtttaggggtgttgggagtgtggagtttgggttatggatttgtgggagtttattgtgtttttgggttttggagggttgtttttgtttgtaggtttgggtgtttttgttaggaggtgatagtgttatgtttttttaggtttttggtgttttgagatttttgggtagatggggatgtattttttagaaattgagttgggttgtttaggggtgagggaatgtgtgtgggtaaggttgtttaatttttagggttttttatgttttttttgtgttttgatgtgtgagaatattgtttttggtagtgtagggtgtttttatttattattttttttggttgggtttggttagtagggagggttgttttgtgtgtgtgttttttttttattttttagggtggtgtagggtggtgggttttgttttttgagtgttgtttgtttggaggtttttgttttgagggtgtggaagggagggttttgggggtgggggaggtgtgtattttttgtgttgtgtattttatttgtgtttgttgtgttgttatttttagtagtttttgtgttatgggtgggttttatgagatagttttgtattgggtgtttggtttttttgttttgggttttggtttttttgttttgggttttggttatggatttttttggtttaagatttagggtttggatttggtgtttttaagtgttttgggtttgggagtagtgtttagatttttgttgttgggttttgagaatttgtttttttaggttttttattagatttttttttttttttgtattttttgtttataatgaaatttttggggtgtattgtttttgggtattttttgattttgggtaagttttgttgggtggggtgtggttggttttttggggttttttgtgtagtttggtgatgttggttagtttgtagtagtggggttttgtattaatggggttttttgtttttttttttttttttaggattgttatgatgggagtagtaatgggaatttgtgggttttttattttttttttgttgggtagtatttttatagttttgtgttattttttttttatattggagttgttgaatattagttgttattttattttttttttttttattagtagttggtttatttttagttggttgatttttatttgtatttgggggaagtgtatgttgttgttattaattttttgtattagttggtgtttataggtagttagtagtaggtttggtttggttgttagagttaggagggagtggggttgtttttgtattatgggtgtttggttggtttattgttttatttttttgggttggaggtgggtgtggtgagtgtttgtagggatgtttattgttgttttgatttgttgttgttttatgtatatgttttggatgttgtgggtttggttgagaatttggggttttatgatatgttttattagatggatgaggtgtaggtgagtggtgttgtggtttttgattggatttgtttattttatggttttttgtttttattttgtatttttttaggtttttttgaatttaagggaattttgtttttttttttttagaatgttgatgattagtatttgttgttgta

SEQ ID NO: 56 - DNA, 6709 bp, Artificial Sequence
  chemically treated genomic DNA (Homo sapiens)
tgtagtaataggtgttggttgttgatattttgggggagagaggataaaatttttttaagtttgggggagtttagaggagtgtggggtgggggtagaaggttgtagggtgaataggtttggttaggagttgtagtgttgtttatttgtattttgtttatttggtgaggtatgttgtggagttttaggtttttggttaggtttgtggtatttagggtgtgtgtgtggggtagtagtaggttggagtggtggtaggtatttttgtgggtgtttattgtgtttgtttttagtttggagaggtggggtagtaggttggttgggtgtttgtggtgtgagggtagttttgtttttttttggttttggtggttgggttaggtttgttgttggttgtttgtgggtgttggttggtgtagggggttgatggtggtggtgtatgttttttttagatgtgagtaggggttggttgattgggagtaggttagttgttggtagggagggggaaagtagggtggtggttgatatttggtgattttagtgtgggagaggggtggtgtggggttgtagaggtgttgtttggtggaggagaggtgggggatttgtggatttttattgttgtttttgttgtggtgattttggagggaaaaaaaaaaataggagattttgttagtgtgaaattttgttattgtgaattggttggtattgttgggttatgtagagggttttgggggattaattgtattttgtttggtggggtttgtttagggttggaaggtatttgggggtaatgtgttttgaggattttgttgtaagtaaagagtgtggggagggaggagagtttggtgaaagatttgggggaatgagtttttaaagtttggtggtgaaggtttaggtgttgtttttaagtttgaggtgtttggaggtgttaagtttgaattttgggttttgggttagaaaagtttgtggttggagtttggggtgaaggagttagagtttggggtgaaggagttggatgtttggtgtagagttattttgtggagtttgtttatgatgtagggattgttggaggtggtagtgtggtaggtgtggatagagtgtgtggtgtgggaaatgtgtattttttttgtttttgggatttttttttttatgtttttgggataaagatttttgagtgggtggtgtttggaaagtagggtttgttattttgtgttgttttgggaagtgaagagggagtgtgtgtatagggtggttttttttgttggttgggtttagttgaggggagtaataagtgggggtgttttgtattgttaagggtagtgtttttgtatgttggggtgtagagggggtatgaagaattttggaaattgggtagttttgtttgtgtatgtttttttgtttttgggtggtttgatttagtttttaaaggatgtgtttttatttgtttaggggttttggggtgttgggaatttggaggaatatggtgttgttgttttttggtggaagtgtttgggtttgtgggtaggggtagttttttagggtttggaggtgtagtgaatttttgtgagtttgtagtttgagttttgtgtttttggtgtttttgagtttgtttagtgttgtttgtgttttttttttttttttgtttgttgtttttttttttttttttattttttgaaattttagtttaatttgtttgataggttggagtatttgtgagtttttatggttttatttggttttgggtatttttattattattttttagtttttattttttttgaaagttaaattttggttgtttttgtgtttttttgaggaggtagtggggtaggtgataagttggttttggaggagtgtttgttaaggtgttgttagtaggtagttttatttgatttttttggatagagattttgtgtgtaaaagttatgtttgagggttgtagatggggtatttttttgagaaaatgggaagtagggttgtttgttgtttaggaaagtgtttggtaagttgtgtgggtgggatttgttattttttttttaggttttgtttttgaggggaggttatttaggaaaaggttttatataggaaaggggttttgtagaaatggattaaggggtgtttggagaagtggattttgttttattgagaggttagggtttttatgtttttgtttttgattttggtttagtggtttttgttttttggattgtttttggtggggtggggttgtattttggagttttagtttattttgtagttttttttgtatttgatattattggttattttttataatatggtgtttggtgttttttaaaatagttgttagttaaatttaggatttttttagtttttaagtggtaaatttaaaattggggttatggtgattaggtgtttgttgttgtttttgttgtgtgtgggttttgttgtttgggttattggatatgtattggtggttttgtgagtgtagatgttgttgttgtgagtgttaagattgttttgtggatggggaaagttgtgtttgaatagtgtgttttggtgatagttgggggatttgagtgttttaatgagaaggaaattattataatttttttttgggggttggtgtggaggtttaggtgttgggtggggtggtttttagttagttttagtttagttttgttttgtatttgggtttggtgtagtgttgagttttatgttgtgagggatgaagtgtggagttagtgggtggtgttttgttgatagttgaagatttgtgaggtttgggttttttgatgtgttttttttttgttatttttattgtaaatatatttgagattggtagagttgggggaagggatttaaatattgaaatttattttttttttgtttaaatggtttttatttgtttttttaaaagatggatgttatttggagttaagaaattgtgtatttggggagtgatttaataattggggtttttttattttttaaaaatatattttattttatttatattttattgaggtttaaggtttgagttgggattatgtagttggagttttagtgtgttagagatgtttagttttttttgtgggtatagtgtggttttggtttttgggtgggaggagagaggaagggatttttggggagtttgttttaagggttgtagaggtagtagatggttttatttgtttaggagttgtggatagtggtgttttgttgttgttgtttgaagtggtattttttgtggttggttgaggttagggggaatttgtgtgtattggattagtttagtggtttggttttgttttgttttgtggaatgttggttttgtagttgtttttggtgggttggttatttagaagtttttatttgttttgggaaagaagtgttgggtaggaataaaatttgagtgttatgggtaaggtgagggtgaggaggtgtaggaagttgggagagagtttgtagagagtttttgattggagaggtagatatttaggttttatatgtttagatagaaaatgaaatttttttttatataaatgttgttttttttttttttttggtatttgttatttaaatttgaaagtaaagtgtaatattaatttttaaaatttaaattaatgaaattttttggtttagttattatgtagtaattgatttttattgtaaggggaatattgttaatttttgagggtgtatttgttgggatgttttaattggttttttgggttggatttaaatattttgtggggattagaggataagattatttttatttgatattgaatatgattttgtaataattaatgtttattagtatggtgtttgtatttgtagtagatatgatttttttatttatggaatggtggtatttattgttttgttgtttttttttgggtttgtttgaattttagtatttatttagatttaggtgggtttaaaagaaaataataataataggtgttttttaagggaaatttttttttggttttagatagtagttaaattttaggtgattttttgattggatgtgggaataaaatttggaagttgaaattattgagattttttggttaagtatatttgtagggttttgtattaaggagaatagtgtataaaaagatatataggattttgatattttggttttaaaataggtttttgggggtaaaataagttattgtagaagtagtgtttttggtattagtggtgggggagggggatatttgttagaagtagaaattagatttaggtttgtaggtattttagagtataggtttaggaagatgggttttagatttgttagaggtgtggtgttttttttgggtgtttgggattttttgatgggtgttgttgggttgtttgatattttgggttttttagtttttggttttattttttgatttggtttgaggtgtagtttgaataagttgttttgtttgtgttggtaagtttattttttgtatgttggggtttggaatgggtaagaaggtgtttattttttattttaggttttggttttttttttttatagtaatattagttaaagttgtttggaggaattgatatgtttttttgtttgggagtgtttatgtaggaggtgaagggagttgatgggtattgagggtttgtgtagtattgtgttgtgggtttaaaggatttagaggatttggaattgtttggtaaaggttatttatttttaaggagtttttttggattttggtgttgttttttttttaatgggtaagtgtttgaattggagtgtaatttttgtgttttttgtatggaaggtagttagaataaattttttgtttttttggtatgggagatttttttttaatatgtatatttttggtttttgggttggtatttaggtatgtgtgtgtttttgtgaggaagttttaatttttttttgattttaatttttttgtttagtagagttgggaattgaaggttttagtatttaagatagtttttttttaatgtttttgttttttgtttatgtgaagatgtggattgtgtggttgtgtttaagatagttggtattggtagaaggggatttttttggaattttggaggttttgtagttgtttggagaagaggatggaaggttgttgggggtttttttttattgttttttagggagtttaaatttatttattttttggaagttttggatttatgtttttatgaaattgtaaattaggtttttgtaatagtgggagtgttttaatagtgtgttatttttaaagaggtgtgaggtggtgtttttggaaatagggtttttggttttaggtttgagttatttgttatttttgtttttattttagatggaagaaggtggttaggtgggtagagtaagatttgggtagatttgtgatttttttttttgttttagggaggggatttttgagtagaagatggaggtttttgagtgtttttgtagattttgtgttatgtgttggatgtttgttttgttttttgggataatgtgagtgttggtagggattttagtaagtggtagatttgttaggattaagtaaggtggaaaggttggggtttgtggtaaatttaggaggagggggtatttatgtttgttattttttttttgtggtattggtatttattggattgatattggtgttaaagggtattttgaagtatttatgtttagtaagggtatgttttggggtattatagatattaagttatagttattttaaaataattataaaaatgattattgtaaataatagattgttttaatagggtgtgaagtggttgttgtatatagatgtttttggttttagttttattagatttagtttattgtttgtttttttgtgttttgtgttaggttgtatgttttttgtttagaattttttgagttttaatttttttttttaaataatttttttttttaaataggtaaagtgaggtgaggagttgaggggtttataggtttttaagtttttgaggagggtttgggtttatgttagttttggtttgttaaatgagattttgtgggtatagtttttaatttgataattatttgttttattttatagtaggtaaaagtgaatttttagttgtttaattatttgaaagttataaaggtgtttagggttgaaggttatttttttagtggttttattagggagtttgttagagatatgtttgattttttttttgttttgttttgggggggatttttgtttgttggaggttttatatgtttggttgtgggatggtagatttttgttatttttttattaatattttggagtttatttgtatgtattttaattgtttggagtgtaggtttgaggattaaggtggtagttttgtgttttttgaggttttttttgttttgtgttttgggttgttatatattttttggttaagtttggtgtttttaatttagaatttggttgtttttaggtgtggagtaggttattgttgttagatgttgtgtggatttgtttttttgtgttagtattgggtgataggtagtttgggtagtatttaggagttattttgtatggttttaggtgtttgttttatttagtgttattttttgttttttgtagtgagtttttttgtagttttttttttttgttagtttttggggttgtatttgttttttatatagatatttttttttttatttgtaggaattggaagtttatggtgttagttttttaattttttgtgagttgaggagtttaagagt

SEQ ID NO: 57 - DNA, 2296 bp, Artificial Sequence
  chemically treated genomic DNA (Homo sapiens)
gttattgtattttgttaatattttttaaaagtaaaaaataaattaaaaaaaaagtttttagtggattgttgagttttttttgataggaggtattaaatgtgttttttttgaggataggggaagagtttattatttagttatatttttgtatattttataaaatttatttttattaaggatgtttttttataaaatgaggagtagtataaagaatatttaagaaattaggtttgatttagggtttttgatgttggggtaggttttttgtgtgttaatattttaggggattttgttgtagttttttgaatattggttgtgagttttttaattttagttgagttttagtattttttttatattatttattttttttgtttgtttttggtgtgtttagataattggaatttttgttgatattttaaatgggttggttatttttttagtgtggaggtatttagtataaggtgtgatagattagtatttgttgatgagtaataaagttattttggtaaattggattttttttttgaaatgttttggtttttatatttttaatgatgggttaagaaatagtttttaagaagaaggggtggagatagggggtaggattttgtttgaagtttttaagttgattttgtttgtagttatttaatttattagggagggttggatttgtttttttgtggtggattttttgtatttttagaaagtgtaggggtggagaattaatttagttttttttttttttataagagttttgttaggttagtttgtatgaggagggtatgtgtatatttttaaaaggattggtgtagttatttttttaagtttatagttttagtgtgagtttagggtttagatttggggtttttggtgttttaggtgtgagttaagttttttgagtaagaggttttatgataaattagttggagtttgggggttatgaaagtattggttatggtagaaattattagtttgttattgtttatgttgttttgtttaaaaatgatattgtgtaagggattttgttaatttttaattttgggagattatttattatttggttgtggtttgttgttgaataggaaagtattttgagatgttaagagattaaaaggtttgtaattgttgtttagaaatgaaaatggttttaaattataattagagatggaagtgtgttttaggggagggtggggtgttgtgtaattgagttttttatgtgtaaggtggatataaatggtttatggatgtgggtgaaggtttttagagtaaagaatgtttatttttattagattaaaatatagtttgggaaaataattatttgtttgagattttgggaaagtaaaattttttggtttttttgttaggaagaatgattgtaaaataagggttgagaattttttaaataagattttagaattttatttaaatagttgtagtttatttttgaggagttttagatttatttgggtttgatggatgttgtaatattaagtttgaggtttttttagtttggtgttaagagtgggttttaggggataaatagagaatagttgtttttttaattggagtagaaaataaaatttttttttttttttatttttaatttttttgttttgttgtgaaattgttattgtgtttttgaggagtgattaaaattttagttatgattaatttaaagggtaggtttttaggtagggaagggaaaggggtttaaggtaaaaaaaaaaaaaaaaagttagttgaagtgagtttatggaggatttggggattataaaagttatgggatttgagttaattaaaattaatggaaaagtattaatatgtaatttaaaaaataataataaaataaagtagtaaggatatttttggtttgttttttgtttttatttttgagtttgtttgggaattttggagtagattttttgaagtatagtatgagtgtttaatggttgttttaatttatttttttgttttttatatataaagattttgtaatggagagtgggaatgaatggtttatttatttttgaatattttttgtgagttgggaatgtgtttagtaaggttgttggagtggagggaaaagaaaaggtgtttgagttttttagatatgggtagaaaaggagagaatttgagataggttgagagaaagttgttttggttggtagtattgttagatttttagatatattgtatattttagtttttgaaaaggttattttgagtttttttagggtttttggggtttttattttattttaaatatttggaattgtttgtgtttgttataata

SEQ ID NO: 58 - DNA, 2296 bp, Artificial Sequence
  chemically treated genomic DNA (Homo sapiens)
tattatagtaggtatagatagttttaaatatttgggatgagatgagagttttaggggttttagagggatttaggatggtttttttgggggttggaatgtatggtgtgtttgagaatttggtaatgttgttaattggagtagtttttttttagtttgttttaaattttttttttttttgtttatgtttagagaatttagatatttttttttttttttttattttagtagttttattgagtgtatttttaatttataggaaatgtttaggggtgggtggattatttatttttattttttattgtagaatttttgtgtgtgaagggtaggaaaataggttaaaatagttattgggtatttatgttgtgttttaggaagtttgttttaagatttttaagtaggtttaagaatggaagtagagagtaagttagaaatatttttattgttttattttattattattttttaaattgtatgttggtgtttttttattaattttaattgatttaagttttatgatttttgtgatttttaaattttttataaatttattttaattgattttttttttttttttttgttttgaattttttttttttttttgtttgggaatttgttttttaaattggttatggttgggattttaattattttttaaaggtgtagtgataattttataataaagtagggaggttgggggtgggaaggggagggagttttgttttttattttgattaagagagtaattgttttttgtttgttttttggggtttatttttggtattaggttggggagattttaaatttggtgttgtaatatttattagatttaagtgagtttggggttttttaaaggtgaattgtagttgtttggataaaattttaaaattttgtttgggagatttttagtttttgttttataattgttttttttggtaaagaaattaggaagttttatttttttaggattttaggtaggtaattgtttttttaaattgtattttaatttgatggaaatggatattttttgttttgagaatttttgtttatatttataaattgtttgtatttgttttgtgtatgggaggtttgattatatagtgttttgtttttttttgagatgtgtttttatttttggttataatttagggttatttttatttttaaataatagttatgagttttttagttttttggtattttggagtgtttttttgtttagtggtggattatagttaggtggtgggtgattttttgaggttgggaattggtaaaattttttatgtggtgttatttttaagtaaagtagtataaatggtgatgagttggtagtttttgttataattaatgtttttatggtttttaggttttaattgatttattatgaggttttttgtttaggggatttggtttatgtttgaaatattagaggttttgagtttgggttttgagtttatattgggattgtgagtttagggaagtggttgtattagtttttttggaggtgtgtatgtgttttttttatgtaggttgatttggtggggtttttatggggaggaggggggttgagttaattttttatttttgtattttttggagatgtggagagtttattatagggaggtagatttagttttttttagtgaattaagtgattgtaaatagagttagtttggaagttttaggtagggttttattttttatttttgttttttttttttgggggttgttttttgatttattattaaaaatgtaaaagttaaaatgttttaggggaaaagtttaatttgttagaataattttgttatttattaataaatattgatttattatattttgtgttaggtgtttttatgttggagaagtagttagtttatttaaaatgttagtaaagattttagttgtttaaatgtgttagggataggtaaggaggataagtggtgtgaggaggatgttgggatttagttgaagttggaaagtttatagttggtatttagagaattgtaatagggttttttgggatattagtatgtggggaatttgttttagtattagaggttttgggttaggtttggttttttaggtgttttttgtgttattttttattttgtggagaggtatttttggtagaagtgaattttgtaaaatatgtaaaggtatggttgaatagtgaattttttttttgtttttaggaaaagtatatttggtattttttgttagaggggatttagtaatttattaaagattttttttttaatttattttttatttttgaaaaatgttggtagggtgtagtgat

SEQ ID NO: 59 - DNA, 4247 bp, Artificial Sequence
  chemically treated genomic DNA (Homo sapiens)
ttttaaaaaaattaaaatataaaataataataattattaaaaattttatttttgtttttttaaataaaaaatttattttaaaaattttaatttaaaaatttaaaaatgaaaaatgtgtattataatttttaaaaatttttgaatttaaaaatgatttttgttttttgttttttttgtgtgatgaaattgaatttattaataaaaatttgaaataaaatgaataaaaatgaaatgaaatgaaattatgaaaaaataattgatgaattgtgttgtgaattaatattttaaaaaatgtgaaatttgaataattgtgtgttaaaaattttgaaatgaatgttgtgaaatttttttgaattataaataaatgattttatgatgtgatttgaataaaaatttgatgattttataaaaaaatttaaaatattgatgttgaattttttttaatttttgtaataattgatatgttatataaaatgaaaaaaaatttgaaataaattttgaaatgtgaattaaaaaaaatgaatttgatttgtgattttaatgttttttgattgatgtgaaaaaaataaaattaaatgtttgtgtgaattttgaaaaaaaaaaaaataaaaaattttaatgattaaaaattttttgaatgtttattttgaaattttttttgttgttttttatttaaaatatattgaatttgatatgattttattgttttattttttattatgatttttattttgaattaaatttaattaatttattataataattattgataattgtttttttgttttgtaatattttgtaaattttaaaattgtgatgttgttgaatataaattttgaatttaaaatgtgtgatttttttttttatgattgttgttttttaaaaaaaattatgtgaatataaaaaatttatttaatatgttttataaaatttattattttttttttgattgtgaattatgttgataatttgaaaaatttgattttttgttttttatttttttttttttttttttttttttttttttttttttatttttttgtttatttgttgtaattttataaaaaaaaaattgtttttttaattattttttttttttattttttatatatttttttatttttttttgatttataaaaaaaatgaaataatgattaaaaaatgttaaaaaaaaaaaataaaaatgtaaattatgaatttataaatgatatttgattttgtgtttgatgaaaattatgaattaatttgaatttgtgttttgtttttttgtgatatttaaaaattgtttgaattaaaattgtgttattttttgtttaatgttgatgtaataaaatttatgtgatataaaatttttgaaaatttaaaaaattttaaaatgttatgaatttaatatttttttatttataaaattttaaattaataaaaaatattttgtgaattttaaaaaaaaataataaatattttttattttatttgaatttttttaataaaaatttatatgtatgataatgttattatgtttataaataatgttaaaatataaaaaaaataaaaaattgaaatttgaaaattttattttgtaataaaatttaaaatttaatttaaattttaaaaatttgtttaaaatttaaaatttaatataataaaaataaaaaaaatttttgataatttatttttataattaaaaaatgttaattaatatttttaaatttttattttgtaaataaaataaaaatatatgaaattatttaaaaaatttttattatttgttattattaaatataatttaaattttgtaaaaaaaaataattttattttaaaattaaaatttttaaaatattttaaaatttgataaaaaaaataaaaaaaataaaatttaaaaattaataattttatatttaatattttttgtatttttttttttttttatattttttaataatttttataattttaattatttttaaattttattttttttgtttttttttaaattaaaatattaaaattaaattataatttaaattatatttatattttattaaaaaataaaaattttaaatttattgtgtttttttttattattaattttaatttaatatttaataaatttttttttttaaattattaaaataaatttgtgtaaatttgatttaattgttgtttttgaattattgaataaattgattgttttgttgttttaaaaattatttttattttattttaatttaaatttaaaaaaatttaaattaataattttaattgaaaaaatgaaatgatgtttattaattattattaaaattattattattattattataataattaatgtaatatttttaattgataattttttataaaaaaaaatattattttttttttattatatttaaaataaataaaatgaataataaaaaaataaaaaaaaaaaaaaaaaaaaaaatatatatttttaataaatttttaaatttaaaaattatataattttatattaattattatttttttttaaataataaaaatttataaatttattatgtttattttatatttaaaaaattaatatttttgaaatatttattaaataatgaaatattttaaaaaaaaaataaaataaataaatttttaatttttttattaaatttaattataatttataaaaaaaattttttttttttttttatttttttttattaaaaatattaaatatattaaatttaatatgtttattttataaataaaaaaaaaaaaatataaaattaataattaatttaataaaaaatataattatataatattaaaattttttattttatttatttttttaatttatttttatttatttttaatttaatatttaataaaataaaaatttattaatttttttgtatttatttattatttaattttataattattttttaattttaattaaattttgtaaaatattttaaatttatttttaataatttttaattattgtttgattatttttatttttttatttttatatatttatttttattttgttaaattaattaaattttaattaaaattaattttttatttttttaaataataaataataattttttaaataaaattttaataaatattaataaattttttttttttttttaaaattataaaaataatattttttatttaaaaataataaattttttaaattttttttgatttaaattaaaaaaattaatttataaaatataaaaattatatttttttttgattttttttttttttttgttattatttaattttttaattaatttttttttatttttaaatttaaatattttaataattaatataaatttatttttattaataaaataataaaaatgatatattaaaaaattatatatttatttaaaaaaaaaaaataaatttatattttttaaatataaataaaaaatttaaaatttttttatttttattaaaaaaaaaaaaatttttaatttttaaaaattaatgttttttaaaaattaaattattttaattttaaattttaattttattataaataaattttataattttaaataaattattaaatttttttaaattttaaatattatatttattatatttaaataattaaaaaaatttaataatataatattatataaaatatttaatttatattaattaaaatattaatttaaattgataaaatatataatttaaaaataaataaatttataaaaatattttttattaaaaataataataaattaatatttttaatattaaaattttaaaatttaaaaattaaatttaatttaaataaaaattataaaattaaaaaaaaattaaatttataatataaaaaaaattttaaataatttttttatttaatattttattgtattttttttttatttaataaaaaattaaattattaaaaatttaaatttattttttaatgtaattatttaatttattttgattttttttttaataataaaataaaaaaattgtaaaaaaatttttataaaataaattattattattaaaatttttttaatattattttttaattatataaaatttaaaaaataaattaaaaataaatttttttaaaaaaatataaaaattttttaaaaaaaaatttttaaaaattataaaaaaaaatttaaattataaaaatatataattttaaaaaaaaaaatataatattataaaaatattatttttttttaaaataatttttaaatttaaatata

SEQ ID NO: 60 - DNA, 4247 bp, Artificial Sequence
  chemically treated genomic DNA (Homo sapiens)
tgtatttaaatttagaaattattttgaggagaaataatatttttatagtattgtatttttttttttaggattatgtgtttttataatttaggtttttttttgtagtttttagaagtttttttttaaaaagtttttgtgtttttttggggaggtttatttttagtttgttttttgagttttgtgtagttagaaaatggtgttagaaaaattttgataatagtagtttattttataaaagtttttttgtgatttttttattttattgttgggaagagggttgaggtaggttaggtggttgtgttagaagatgagtttgggtttttagtgatttagttttttattaagtagagagggggtgtggtagggtgttgggtaggaggattgtttgaggttttttttgtgttatgagtttgatttttttttaattttatagtttttgtttgagttaagtttaatttttagattttaaaattttagtattgaagatgttagtttgttattgtttttagtagaggatgtttttataggtttatttgtttttaagttatatgttttattgatttaaattagtgttttggttggtgtgggttaggtattttatataatattgtattgttgaatttttttagttatttagatataatagatataatgtttgaggtttagagaggtttagtaatttgtttggggttatagagtttatttatggtagagttgggatttagaattagggtagtttgatttttgagagatgttgatttttgagagttagagatttttttttttttaatgggagtagggagattttaagttttttatttgtgtttagaggatgtaaatttgttttttttttttaagtagatgtgtagttttttagtatattgtttttgttattttgttaataagagtaggtttgtgttgattgttaaggtatttaggtttagggatgggagggggttggttagagagttgggtagtagtggggagagggggagggttgggaaggggtatggtttttatattttatgaattaatttttttggtttgggttggggagggtttagaggatttattatttttgaataaggggtgttatttttataattttgaggaaggaggaaagatttgttgatatttattgagattttatttaaaaaattgttatttgttatttgagagagtagggggttagttttggttagggtttaattaatttggtgaagtaaaggtaggtatgtaaaggtaggaaggtgaaggtagttgggtggtggttgagagttattgaagataaatttaagatgttttatggggtttagttaggattagaaggtagttatggggttaggtagtgggtggatgtggggaagttagtgggtttttgttttgttagatattaagttggaagtagatgaaagtgggttaagaggatagatggggtaaggggttttagtattgtatggttgtattttttattaagttggttattggttttgtatttttttttttttatttataagatgggtgtgttagatttaatgtgtttaatgtttttagtagaaaaaagtgagaagagaaaggaggttttttttataaattatagttaggtttagtgagaagattagaggtttgtttgttttgttttttttttaaggtattttgttgtttagtaggtgttttggaaatattagttttttgggtgtaggatgagtgtaatggatttatagatttttgttgtttagagaggggtagtgattagtataaggttatatagtttttaagtttaagggtttgttggaggtatatatttttttttttttttttttttttatttttttgttgtttgttttatttattttgggtgtgatgggaaggaagtgatatttttttttatgaaaagttattgattgggaatattgtgttaattattataataatggtaatagtagttttaataataattagtagatgttgttttgtttttttggttgaggttgttggtttaagtttttttaagtttgagttggagtaaaataaagatagtttttgaagtggtgaaatggttggtttatttggtagtttgggagtggtggttaggttgagtttatgtgagtttgttttagtagtttggggaggggggtttgttaagtgttgagttggagttagtagtgagaagaaatgtgatgggtttgggatttttattttttaatagggtataggtgtagtttaagttatagtttaattttagtattttagtttgggggagggtgagagagatagggtttgggggtagttgaggttataagagttattagagggtatagaaagggaaggaggtgtgggggatattgaatgtgaggttattaatttttaagttttattttttttgttttttttattgggttttgggatgttttaaaagttttagttttaggatgggattgtttttttttatggagtttgggttatatttggtggtgatggatagtgagagttttttagatggttttgtgtgtttttattttatttatggggtagaggtttagaggtgttagttgatgttttttaattgtagaagtagattattggaggttttttttatttttgttatattaagttttaggttttaggtgggtttttaaggtttggattgggttttgagttttgttgtggggtgaagtttttgagttttgattttttattttttttgtgttttagtgttgtttgtaggtgtagtgatgttattgtgtgtgtgggtttttattagaggagtttgggtggggtaagaggtatttgttgtttttttttggggtttgtggagtattttttattggtttaagattttgtaaataaagggatattggatttgtagtgttttgggattttttgggtttttgggggttttgtattgtgtaagttttattatgttggtgttgggtggagggtgatgtgattttagtttgggtgatttttagatattgtggagggatggagtgtgggtttgggttggtttgtagtttttgttgagtgtgaagttgggtattgtttgtaagtttgtagtttatgtttttgttttttttttttgatgttttttagttgttattttgttttttttgtagattgagggaagataaggggatatataagggataggagaggagagtaattagggaagtgattttttttttgtggggttgtggtgggtgggtggagagataggagaggaaaagagaaaagggaagagaaggaaggggtagggggtgagaagttgggttttttggattattggtgtagtttgtggttgaaagaggaatagtggattttataaagtgtattgagtaagttttttatatttgtgtagttttttttaggaaatggtggttgtagaggaaagggttgtgtgttttggatttggagtttgtgtttggtggtgttgtggttttgaaatttgtgggatgttatggggtggaggggtggttgttgatagttgttataataaattagttgagtttagtttgaggtggaaattgtagtaggaagtgggatgatagagttgtattgggtttggtatattttaggtaagagatggtgaaaagagttttgagataaatgtttgggaagtttttggttgttaaaattttttgttttttttttttttgaagtttgtgtggatgtttagttttattttttttgtgttggttggggagtgttgaagttgtgggttgggtttgttttttttggtttgtgttttgaaatttattttgggtttttttttgttttatatagtgtattgattgttatgagggttggaggggatttggtgttggtattttgaatttttttgtagggttgttgagtttttgtttgggttgtgttgtagagttgtttatttatggtttggagaggttttgtggtgtttgttttgagatttttagtgtgtggttgtttggattttgtgttttttgagatattggtttgtggtgtggtttgttggttatttttttgtagttttgttttgttttgtttttgtttgttttattttgggtttttattggtaagtttggttttgttgtgtggagaaggtggggggtggggattgtttttgagtttggggatttttgggaattgtagtgtgtgttttttgtttttaggtttttagattggagtttttggaataggttttttatttagaggagtggaggtaggatttttagtaattattgttgttttgtgttttagtttttttggag

SEQ ID NO: 61 - DNA, 20 bp, Artificial Sequence
  chemically treated genomic DNA (Homo sapiens)
ggagtggaggaaattgagat

SEQ ID NO: 62 - DNA, 22 bp, Artificial Sequence
  chemically treated genomic DNA (Homo sapiens)
ccacacaacaaatactcaaaac

SEQ ID NO: 63 - DNA, 33 bp, Artificial Sequence
  chemically treated genomic DNA (Homo sapiens)
tgggtgtttgtaatttttgttttgtgttaggtt

SEQ ID NO: 64 - DNA, 22 bp, Artificial Sequence
  chemically treated genomic DNA (Homo sapiens)
aaccgcaacgactaacaacgaa

SEQ ID NO: 65 - DNA, 21 bp, Artificial Sequence
  chemically treated genomic DNA (Homo sapiens)
agggcgtttagttaattcgcg

SEQ ID NO: 66 - DNA, 30 bp, Artificial Sequence
  chemically treated genomic DNA (Homo sapiens)
cgcgacgacaaaacgccctttaaaaacgaa

SEQ ID NO: 67 - DNA, 20 bp, Artificial Sequence
  chemically treated genomic DNA (Homo sapiens)
cacgcacgatactaaacgcc

SEQ ID NO: 68 - DNA, 20 bp, Artificial Sequence
  chemically treated genomic DNA (Homo sapiens)
tcgatcgtgttggttgttcg

SEQ ID NO: 69 - DNA, 27 bp, Artificial Sequence
  chemically treated genomic DNA (Homo sapiens)
cgaccgcctaccgcttcataataacgt

SEQ ID NO: 70 - DNA, 21 bp, Artificial Sequence
  chemically treated genomic DNA (Homo sapiens)
acccgataaaaacatcgcgta

SEQ ID NO: 71 - DNA, 22 bp, Artificial Sequence
  chemically treated genomic DNA (Homo sapiens)
gttcgtgcgtttgtagttcgat

SEQ ID NO: 72 - DNA, 23 bp, Artificial Sequence
  chemically treated genomic DNA (Homo sapiens)
aacgcgaccaacgcttcaacgac

SEQ ID NO: 73 - DNA, 24 bp, Artificial Sequence
  chemically treated genomic DNA (Homo sapiens)
tttttgttaagcggtttcggattt

SEQ ID NO: 74 - DNA, 22 bp, Artificial Sequence
  chemically treated genomic DNA (Homo sapiens)
ccgcctaaaaacgtctacgcaa

SEQ ID NO: 75 - DNA, 29 bp, Artificial Sequence
  chemically treated genomic DNA (Homo sapiens)
taaaaactcgcgcaacaccgtaccgtaaa

SEQ ID NO: 76 - DNA, 30 bp, Artificial Sequence
  chemically treated genomic DNA (Homo sapiens)
gttagtttttttttgtcgtttttttttcgt

SEQ ID NO: 77 - DNA, 22 bp, Artificial Sequence
  chemically treated genomic DNA (Homo sapiens)
tcgcctaaactcaactacacga

SEQ ID NO: 78 - DNA, 21 bp, Artificial Sequence
  chemically treated genomic DNA (Homo sapiens)
gcgttcgggagtttcgtgagg

SEQ ID NO: 79 - DNA, 4513 bp, Homo Sapiens
agtgtatggggaaagaccaatccaactgtccatctgtggctgggacagcccagggggtgtgcccacggctgacccaggggtgtgcacacggctgagctgggagtcccgctggtctccctgaggactgagggtgaacttcgctctttgccttaaacctctttatttcattgcagtaatagttttacgttgtacataatagtgtaaacctttttaaaaaggaaagtataaaaacaaaagttgtaatttaaaagtctgaataaccatctgctgcttaggaaactcaatgaaatgacatgcctttttagcaggaagcaaagttggtttctgttttttgttttctttgttgttttagtttataaaacatgtgcattttacagttccagtatcaaatatttataatcttatgagaaatgaatgaatgtttctatttacaactgtgcttatcaaaattgtgaacacccccacccccgcatttttgtgtgttgaaattcttgaaggttacattaaataaaacaaaatctctttattataaaatactgaaggtcccaggtggaatgatgagttttctaagcatgtctgagtccagaggaactgcctgggcatcctccccagtactcaggtgctcatggccttcgccccgcctgggagcaggtgccaggtgcctttgtagcgagaggtgattattatttttttttaaataagacagtttggatatgtcacatgtgagcacagaataaccaaaagaagtacacattttgttaccaggaggaagtgttcaaaactacggtgctattccagtgactacatttttttaaattttgcgaagttcaacaggtctccctccggctgggtgctcactggccctgccacccgtgctggaccgaggcgctttcccctggggacaggaactttttactccactgagacaaagagactctccttttcaaagtgtcatttttgtttaccttttgttgtttcccccccaaaacaaaagactttgtacaacttcctaagcaggattgggggagggatcagcttcgcctgtgctgaccgcgcctctggattccgctcatcaggaagtgtttggggtctttgagcgagtgatctacgcgttgaattgctgtttttccaaactttcatggcttaaaaattttttttcttctccctgtaaaagaaactcagagactggtgatctgttaccgaagacgactttttaggcgttttctgtttccccaggcagctgggccgttggcgttcccaggcggaagcggggcctctgggctgggcctctgccctgccaggaagcggtctgggggctgcccctcgggattttcagaaccctggaaggagagagctggggtctcaccgcggagactcccgagttctcgttgcctgggcccgagctgcgccccagggtcatcgctgatggcgcgagaccacgcattccccgcgaaccccgacttctgaacagttcagaaagttcgtagattaaaaaccaaacaaaaaatactggcacaacttctattgccgtattggcctctctcttattttaataaaaatacggtaacatgaagcgatcatttttttaaaaatctgttttcaaagtataacactgaaaaggggcaaggcacagctttgtaaggtaatgagttccccgtcctcagaggtgttcaagcagacgctaggcttacagtggcatggagagtgttctttctctttggaactggatgagtcctcagacccttgaaacgctgagtttttttttttttttttactcctatgtttattacattttaatccaacagcatataatctaagctgctccctcatggagagccgcggctgtgccacctgcctgctttcgccatggagaccggagtcaggcctgcagggaagtcggtgcgcctttcccaagtcctctgcccgctggttcctctcgggcctcccgggctctgcgtgccgcggatctggacccggactgcagacaccgccccacgactgggcccccggccagactgttaccccacaggaggagggttccctaagtgtgcagaagaggaaagctcatttataaagtccttgctccttcgagctgaacgacccccgcgcccgaggcctagctgtgtccccgccgggcccaggctgagcttactccacactgctccatagccgggcagagactccgcgagggtctgggagtcctggcctcggaggacccgccgccctgcaggcctgcccaagcaggcgcccccgcgagagtgcgggacagagagggcctggcggggctccttggcgctgagagccctccttctccgctgcacccagctctgccaacggggctggatgagtgggggctggagtcagaatcccagggtctacacccgccgacagcagcaatgccgacccgccctgcctttctcctaaggagcggagggaaggagccatgtgaatgaccccagcctgaccaccaagagggcgccagcatttctgttttcctagagtgaaaaggtcaaatcgatgggggctcctacaccgctggacacaggtgcgcccgggcgtccagtgcgcgcaacacacgcccagacactctatatgcaaatatgcctgccgccgcggagccggccgggaggcagcgtttgttcgctggggttctgctagaagtcattctgtctcccgctggtttaatatccgccctctgcggtctccgctcgcctcggcggctcccgaagcgcccccgggagggtcccggctccgccgaaaactgcagcctgccaggctgagccgccgcgcgctgggaggttaatagcgactgacgacaaagggccaaggtgcaattcctaaagcggggattcgccgggtgaggcagaaatcagcctccggggagatgggtccccccttcccgacgcgcccctgcacacactgctgccccggcgccgggcctccgggcggggacccctcttccgggcatcgcggccccattcggcggagagctaggccctctccaggcctccaagtagggagcggacgtgggtggtggggaagggaagccgccggcgggacggagagtggggtcccccggaccctgggtcgggcaggcctggcgctggcagctctgttgcacagatttgtgagcgatgctggtggccgcattgccgcgcggcgcgaaccccaagtagaccattcatgtttttattaataatctcaaacacttcattatatttatgctgcctgcccagagaaaataaaaggccattcttgaaatcgcctgaaatgtaataatattcattaaagcgcctcctaattatgtgatttaatcaagcgtggtgcgcccgcgctctcggctctcgctggaaaggctggcgatgacggttattattactgctgttgttagtggcctcgtgatagcagccggccagctcttcagtccaggcccagtttcctcagagagactcggggagccccactttgagggatggggttccccggaacgactccgaagtcccggagaccaggcgcggcccaggccctctgcccttctccagccccagccccagccccagccccagccccgggcaaactcttccaggccgagggcaggactttctccagacccttggggccctctgtgtcccctggggacgcccgacccggctttctaggagggggaactccgggtcctgagcccgggccccgccccgttggctgttccgccccctccagggctgagccccgcgcaatgcccgaagcagaaacaaagagtcgccgagatctgcctcctgggccgccttttcaccccctcagcctggaaggcgtcccagagaggccccacccccagcctccacggagacccaggagggaagaagagccgggacccggtagccctgaggggctgccgggcctgcggcgctttctccgccgcagaggggttgggtgggagacgcaggcgggaaggaccctgtcccagccgagagtcctctgtggggtcgaggaatggtgaggatcactgtttgcaccaaccgtctggaagaaaccgggcggccagccgctcgaccccatctgtcgagatgtgaaacttggccgcgcggtccgggcgcgcgctgcctgcgcggaaggagccgcctccctcctttcagcgaacgcattcggggttcccccctcccgccaagtcctttgtctggaaggggactggcaggctctgtcgtcgccgtgtgcccccctcctttccccagcctctaccccctccaactaactttcctttcttcccttctcttttcttccctctctggatgggtaatcacaggctccgctgccaagcgcgctgcgaggagccgctgcccgttcccgtcggtgcccctccccgcggcagcctggccgagtccgcccagcctgcctaggacgtccctgacccgcgcgctcagtttcattcagtggccgtgggatgttgcatctgagtttttcctttaggccaaaactttgtcccgaggtttttctgagagggttttattctccaaca

SEQ ID NO: 80 - DNA, 2280 bp, Homo Sapiens
tagtggcgagcactcgccgctggccttctagggcaggcagtattgccgctccaggcgtgcggagtcggggagaaaaaaaccgaacacgtgtgctacccagggcccccagataagcccctccgcgcgcacacacaccctgaaccggagtccagaaggccggactcgcgtcccggggtcgagccccttactctccgctcccagttcggaagatcccagcctgcccgaaggcggcgtctgacccgctggtggacctggtgggtgtctgttcctgatacctggggacgaggcgggagcgccttgagcgctgggaagcttcgcctcgcgagtccccggcagtgacacgtgggagcgttgggcccggcacccccgacgcttccgaggtttcgggtggtcgttttgctctctcgggggcttttattccttaagtggctttaaacgaccgaggatgggcctcccgcgccgccgcagctgtcacttccttcgggaaaggctagcgaccttggacgcgcaggctctgaaaaccaaggtccagacccataccgagcgcccaaagaccgcatttgaattctcctcgccggccattgagggagagaaaggaacgcttagttccattcacattcacagaaagaagcgccgagggtgggggaaacgcagtcttgccgggtgagccgggacaggttcctcgcctgccccccggccgctgcttcctcttagctgaatggggagcgacccgccccgggcgcggccttcggggctgaagactgaggtgcagcctcacccccggcctggcagcggcttggaagagagagggaaaggaggaacatctacccggctaagagacgccgccagagtccctaaagctggcgggggacggaggccggggtcccggatcttcagagcgcccgcagccgggcttctgggctcctcggtgcggggaacctgaccctgtagccttcgccagggcgcggcggggctgcaagaagggaggaaggagtgggactagagccttcgagggcgcgggcggcgtgcactcagccttgtctccccgcgcgccctgccgcctgcttgccccctttgctgcaccgggtggccctggtccccgcgcccgcccgcccccgacgccttcgcgtggttccgcgctgcccgcggccagccccgtttcgcttcgcaaggagcgtgttgttttctcaatcgaaatgggatcaagatcccagggtttcctcgtctccttgttttgaggtgataggatcttagccaatagatcgaaaacgtgaaaagtacccgtcgcctcttgtcccaagtgcctctgtggaaggatcatttacttggaaaagcagaataaattctgttgccgttttccttccggaggcgtgctcaccccagagctcctagacccactggcattcgctatacttcctcctgggctttacaggtaggatttcaagaatgatatgggggcacctgggtgatctgtgggttgcaggtcctcaagaggccgttttttcgtgcacggaagtgtcgtagctttattttagcggaagcaatatcaaaccttatcttagaggtttgttttgcaaagaatccagagtttactatatttgacactattttaaaataacacttgcttgttttaagaagttgggagaaatcgataaaagaaaagttgaaatccatgcttcccatttctactctaggagataatcctgatcaacagtttggtttgctccctacccccattccttaaaaacaaacaaacaaacaaacaaaccaaaacccactatacttttagattgtgtaggattacgtaggattttgtaaaaataaaaatgggattatacttcactcgtttctgcaacggcctagctcctactagtaatcattccctatcagtatagtagaattaaccttattttagtattatcattattattttgagacagggtctcactttgtcacccaggctggagtacagtggcatgatcttggctcattgcagcctctgcctcctgggctcaagctgtcctcccgtctcaccacccggccccttcccctcaactagctgggactacagtcatgcgccaccaagcccggctaatttttgtatatttttgtggagacaggtttcaccatgttgcccaggctgatctcaaactactgaactcaagggatccacccaccttggcctcccaaattgctgggatggcagacctgagccaccacaccggcaaatttattctttataatggttgcgtggtacagaatttccattttataggtgtg

SEQ ID NO: 81 - DNA, 3640 bp, Homo Sapiens
aatttctagaaattaatttgttacaattttatgataccgtaacatctcttggaagagacatatgtggatgcttctatagcaagaccctgtgataagtaatttttatgtttgtatcaaaataatcagattgtcttgtgattggtctagtcacctagcccaatcttattatctcaggaggaaattaaacttcgttagtattaacatacttgtattaaaataagaacctatacaaacctattgatagaaggtaggaatttatgattgtgcactaaatccattcacataagaaatatttttctttttactggactctatgagactgacattttttatgtagaaataatgtggctttcttctcccaaagatgcttatccatcttattcaaatagagacacaatgagagtattatttaataaatatttgttaaatgttttctccagcattataagaaatgcaccctctaacaaccacaacttcagtaacaccttccttctgttgctaccctaggttgggggccattcaattttaccaagagtgtggaaattctgctgttttaatggggactgaaaggaaactagtcatttctcattcaaaccatcaaggctcctagattgatttaaaatattaagtcggtgtttaaatattccaataaatggactttacaaagagcacaagcaatgtcacttgaggaacaaggcctcaagctgaggagcaggatattggagagcctccttcttaattacccacctttattagacttgaggattttctgtcttacaagaaaatcagaaataaattttattggtatgctctgtaagaacgatttcttctgataacttggggtagcagcatttgtttgattagctgaatttgccatgaatgtggaaataatgacatcaaaacagctcgtgtaacaacctccttaaagacctcgtagattagagatgactatagattttccccagcgcggatcaaagggactgaattgaacgttttagcttaatgatccaacccctgtcacacccacagggacgcgaattccgattttataagcaggtgtgcacgtgcactcagatactcacacaaagccgcgtggagggacgaaaagatcaaccacccgatcgacgaggataggtttgatcttttcgattacctcagtgtgccagtgtatattcccggctgggcctagcgccctaagaaacttcggaactttagctgttaatttttgttttcttactatgacttcccaaagacattctatctgcctaccggggcgaagagaaatgggaccaggcgtcagggcggtgggaccctgtccagggtcctgactccgcgccagggctccagaccagtcggcctccgaaggccctttcacccaccccacacaagaggaaacaaagacttctcagctcaaggcctcagggctgcctcctgactccggtcagtttgcaggaagaggaaacaacaaaacaaaggaaccgccaatccgccgggtattatatccctcagctccaacctccgacttcggaccgccagggtcaccttctctacgctgaccccgcttttcttaaatgaaaacacgccaacaaaagcatacttcggatacaaaatccaagtacgcatcttttttggggaggttagagctgaggtgtacttcggaagatgagaattttgttttcatgaattgggtaacacccaggcattgttaggtaccccgacagaccctctagatatccttctcttcctccttcacactttcttcctatcaaaatagttattgttttgaaattcactagaacaacgacgttctaaaaacaaaggcgcagcaagcatccctttcttcgctgccgcgggctgaaccacggacgctcgcgggtcgcccagccccgacggcccgcagggggcgcgcgccgcagccgcagcacagcccggctacccccagaaagggagccgaatggagggaagcagggagcgcggagggctcgaggcttgcagataaggagaggcgcatcctgggatttgggtcctctgctgctacaacacaaccgtgctattgttggcactgtccgacccaagtgtcggtggtaagcggcgatgtcggggctgggtctctagcaaccgctgtgccctgggtcaggctggtcgccccagctaccgggatccctctccggatgcttccagggcgataggtgctgcacccattgacgggatagccgcatacctccgaacaggtagtggagttcgtctctggcaggcatcctagctgcgctgacaccaaggtcgccacacaatagccatcagccccccttaagccccagaagtaggtttcccctgccccagccatagcggttccagtcgtcgccacgagcccacttcttatccccaagcgcacctccctctcctcacccgggtttatgcccgttacacagagagaactacacagggggaactatggtcctacaccctcgaggggacagacaccggccgtgagacaggcaccacgcagagccttctggtgactgtccgcaggagcgagaccttttttggttttgcagtcggctaggtgtgtgtgtgtgagggtccccagttgactaccgggatgcactgccacttttcggcctggcgggctctgggactccttggtctccgtaggaggccatcctaggccttcggaggaggcgctcccagctggcggcgcccctcgccccgggctcagaggcggacacggtcggtcgcgccctgctggccctttgttcgcgccgcagcgggctgggagcagctgcgcgacaccagacccacagcgccaagacgcgaagcgcgaggaaaccgctgcgcttgactccttctcccccaactcttggacccaggaacgcttccagctcctgcgtcccacacgcccagtcctggcttctctcccggcccagaagtcttcaaggattgaagggctctgcctagggccccgcactcctgcctgactcccatggcccagaaaagcagggggacatttgaaatgtcaccccgggataaatattaacaaaaaagcaaatggacttgtgcaggggccagttatcaatcaaccaggccgcaaggccactcagggcaaacacagcccaggttgggctgggcgagactttctcatggccgccccccgaccgaacccctccccccttggctcaggtccttcttaggtcgttctggggcaaacaccggacgggaagggggcgccgccaactcccccgcggggtttggaggtttcctcgcctccaagtcccgcagggcagggtcggagtgcccaacacccacccccgcccgaacctcgggcctgcgcgccgccttcccctgggtccgcggtgctgcgcttgctgttgggtgtgtgtcgctgtctctttccgagccggcagctcctgctgtgtggccgaagccctctggaatctttaattggaaactaatcttggtcttgatagacgcccacgtcagaggcgcgccacccacccacaccccccgcctcatcccggaggagacgcggcgagaaccctgtcgctctgctctttaatggggcagcagcaagtagtacatggagggaacatatattgatttttaaaaggtagttaatttggtgggaatttcctcctgtcgccct

SEQ ID NO: 82 - DNA, 3240 bp, Homo Sapiens
gaaactgaggcacaaggcagcaatgattactgagggtcctgcctccgctcctctaggtgaggagcctattccaggggctccagtctgaaagcctagaggcgaggggcgcgcactacaattcccagaggtccccggactcaagggcggtccccgccccccgccttctccgcgcgacgaagccgggcttaccaatgggagcccggagtggggcgagcaggggcgggacggggcgggactgcggggaggtggccggcgggccgcgccgcgagccagtatctcagagagcgcggggtccggacagccgcgcgctgagggtctcggggcgggcgccgcgggacctctccgggccatgggtaagcggctctgcggcgcggcccggacaggggctcggcggccctgcagggaggttcaaggtgccggcgccgggtcccctccagccctcgtggcagtcggtgcgctgtgtggggcggagaggggcccggggtgggtttcggggcgcgggccaaggggagcgagcccggcccgcggcttcagcgctccccggccggcgcggaaggggtgaggctgggcgtccgcgcgagcttcgagaaaaggaaagacaaaaagttttggcggccaggggcttcccgggcgtttatctcgaaactcttttcgccgtctcttgcctgaaatatgccgagcccggtacggctctgtcgtcccacttcctgctgcggtttccacctcgagctgggctcagctaatttgttgtgacagctgtcggcagccgcccctccgccccgtgacatcccgcaggtttcagaaccgcggcgccgccgggcacagactccgggtccagagcgcgcggccctttcctctgcggccgccgtttcctgaaaggggctgcgcgggtgtgaagaacttgctcaatgcgctttgtaggatccactgttcctctttcggccgcgggctgcgccgatggtccggggagcccggcttctcgccccctgccccttccttctcttcccttttctcttttcctctcctgtctctccgcccacccgccgcagccccacaggagaggggtcgcttccctggttgctctcctctcctgtcccttgtgtgtccccttgtcttccctcggtctgcagaagggacggggtggcggctggggagcgtcaggggaagagggcaagagcgtgggctacgagcttgcaggcgatgcccggcttcgcgctcggcgggagctgcgggccaacccgggcccgcgctccgtccctccgcggtgtctaggggtcgcccgggctggggtcgcgtcaccctccgcccagcgccggcgtggtggggcttgcgcggtgcaggacccccgagggcccagggggtcccaaggcgctgcgggtccagtgtccctttgtttgcagagtcttgggccagtaaggagtgctccgcgggccccaggggaggacaacaggtgcctcttgccccacccgggctcctctggtgggagcccacacgcacggtggcgtcactgcgcctacaggcaacgctagagcacaggaggggtgggaggtcggggctcgagggcttcaccccgcagcagagctcagagcccaatccaggccttagggacccgcctggggcctagaacttggtgtggcagaggtagaaagggcctccgataatctgcttctacagttgagagacgtcaactggcacctctgagcctctgccccgtaggtgaaatgggaacacacgaaaccatctgaggagctctcactgtccgtcaccaccaaatgtggcccagactccgtggggagggacagtcccatcctggaactggggcttttaggacatcccagagcccggtaagagggacagggagaatggggcttggaagttggtagcctcacattcagtgtcccccgcacctccttccctttctgtaccctctggtggctcttgtggcctcagctgcccccagaccctgtctctctcgccctcccccaagctgaggtactgaggttgggctgtggcttgagctgcacctgtgccctgttagggagtgggggtcccaggcccatcgcgtttcttctcactgctggctccagctcaacacttggcaggcccccctccccaaactgctggagcaagctcgcgtagactcggcctggccgccgctcccgggctgccgagtggaccggccgtttcgccgcttcaaaggctgtctttgttttgctccagctcaagcttagagaaacttaagccaacaacctcagccgagggggcggggcggcgtctgctggttgttattgaggctgctgttaccattattgtggtaattgacgcagtgttcccagtcggtgacttttcatgaaaggaagtgtcacttccttcccatcacacccagggtgagtggggcgggcagcagaaagatggggagggagagaaggaaaggggtgtgtgcctccagcagacccttaaacttgagagctgtgtggccttgtactagtcactgcccctctctgggcaacaggggtctgtaagtccattgcgctcatcctgcacccaggaggctgatgtttccggagcacctgctgggcagcgaggtgccttggggagggagcaggacaggcaggcctctgatcttctcactgagcctggctgtggtttgtgggggaagcctcctttctcttctcacttttttctgctgagaacattgggcacattgagtctagcacgcccatcttgtagatggggaaagggagatacagaaccagtgaccaacttggtaagaggtgcagccatgcagtgctggaaccccttgccccatctgtcctcttggcccactttcatctgcttccagcttgatgtctggcagggcaggggcccactgacttccccgcatccacccactgcctggccccatagctaccttctagtcctggctaagccccgtgagacatcttaagtttgtcttcagtgactctcaaccaccgcccgactgccttcaccttcctgcctttgcatacctgcctttgcttcgccaggttggttgggccctggccagagctggccccctactctctcaggtaacaggtagcagttttttaaatggaatctcagtaggtatcaacaggtctttcctccttcctcaagattatggagataacaccccttattcaaagatggtgggtcctctgggccctccccgacccaggccagggaagttgattcatagagtgtgggggccatgccccttcc

SEQ ID NO: 83 - DNA, 2155 bp, Homo Sapiens
tctcccttccttctcacccctggagggtcccagccaccagccttgaagctgcagcgagagccacccactgccttggcctttgggaccccttgagcaggagaaaaaaaccagaaaaccaaaagagagagagagacctggaaggaagaagtaatggaggagggagacagggggaacgagaggggagcccacaccacagagagagaactccttaaaggaagcgcaggcgtttacgggacaggagcgcggaagaaaagagtagaaaaggaaaagcagtttcaagcaagagaaagtaaggagaggcggacagggaggggaagagccaagagaagccaagctgagggatctgcagcaactttgagaaataaaagtgaactgtctgtgggcggctgctgtgatctcagcaaaaagcggagctcaaggctcagggactccgccgcccacactgtgccccgccttattttggatgcctccaacttcagcttcaggcacagtacacgagtaggggcagtaaggcctggctagggccggtgccgcacgggagctgcgggtccctgcaacacccaggtgtgcaggcgctacaagaaggagccggggccgctgcccccgcagcgcggacttcgccccgtgctgcacacgctttagaagagcgtgtccggaagtgtcctccccggccctcctcgcttcccaagatttgtttgcaacgtctacacccgtcaccaccgcataagcaccagggtgaggaggtctctttgcaggaattaatatcgatttcagtctcctgctccttcaaagtttctctttgacgatggcgagacttatattctaagtcagaagaaaataaaaccttgcctattctgggcccatgattgcacaaaatccaaaatgctgccggcatgaagatgcagctggaagactctagaaacctagcattaggaggcagagactttatagtgcccagagatgagttcctaaataaactaagaattacgcagtgggaaattaaggaggagggtctgaggggccgacctcagagggacagatagagaaatcgagagcgaaacactcaaggaagtggaacaaatcgtcgtagccaggcgtctctgcctctccggaaacccgaaatccgcccaaacctcatcccaggcgctcacggtaccagtcgcagggccccgcactataggggctgccaccctctgcccccggagtccccacgccgagactcatcatttgctggctctttcttccttttcttcttttgtttttttatccttcaaatataagacaaaaatacacctcatttatcatcatagatatatatatttcactctcaccacataaatacaaaacatccaaatatccaaaacattcagaacaaagttagtagcctggattcagtgacacctacccgcgtttgaatcgttcattattttcttcactatttgcctagaaaaaaaaaaaagatgaaaaagagggggagagtttccgacgtaaataatttacaataaaattactattttaaaaaagtgtttttcgcttgcttcagatggatgaatacattctagacactgcggcacctcgcagtctgggtctgtgattttggttaaaatgtgggtggccgtggctgtagggacgatcgccgctgcgcagggtaaggaaagagggtgtcgcggttcgtgttctgatttgggaccactgaaaccctaagactggggaggcgaggggagtgtctttcctatcaatcacacaagacgctatctggactccgagactactgctagaggaggcccgaccacccagcggcgtccctgcctccccttccgcaaagaactgctcagaaatccagacgtttcctgcgtgcaggaagggttttgtgaatccgggtgtttgggagaggaggcaatgagtgctgactcgttttccaaaccgagcaattgtgcccgaagctacgcgcctgggaggccgtagggtgaagcgccggctgcgcaggctaccgccggcagccgctttgctctttcctggaggagtgggaagctgtcggccaccgccccgaacaggctcggagaaaagattctgaatttcctttgattagcggcgttaccttttcctttgcttttcccccattaaattcctgtttaaagttacaacacccagaacc

SEQ ID NO: 84 - DNA, 4513 bp, Artificial Sequence
  chemically treated genomic DNA (Homo sapiens)
agtgtatggggaaagattaatttaattgtttatttgtggttgggatagtttagggggtgtgtttacggttgatttaggggtgtgtatacggttgagttgggagtttcgttggtttttttgaggattgagggtgaatttcgttttttgttttaaatttttttattttattgtagtaatagttttacgttgtatataatagtgtaaatttttttaaaaaggaaagtataaaaataaaagttgtaatttaaaagtttgaataattatttgttgtttaggaaatttaatgaaatgatatgtttttttagtaggaagtaaagttggtttttgttttttgttttttttgttgttttagtttataaaatatgtgtattttatagttttagtattaaatatttataattttatgagaaatgaatgaatgtttttatttataattgtgtttattaaaattgtgaatatttttattttcgtatttttgtgtgttgaaatttttgaaggttatattaaataaaataaaatttttttattataaaatattgaaggttttaggtggaatgatgagttttttaagtatgtttgagtttagaggaattgtttgggtattttttttagtatttaggtgtttatggttttcgtttcgtttgggagtaggtgttaggtgtttttgtagcgagaggtgattattatttttttttaaataagatagtttggatatgttatatgtgagtatagaataattaaaagaagtatatattttgttattaggaggaagtgtttaaaattacggtgttattttagtgattatatttttttaaattttgcgaagtttaataggttttttttcggttgggtgtttattggttttgttattcgtgttggatcgaggcgtttttttttggggataggaattttttattttattgagataaagagatttttttttttaaagtgttatttttgtttattttttgttgttttttttttaaaataaaagattttgtataattttttaagtaggattgggggagggattagtttcgtttgtgttgatcgcgtttttggatttcgtttattaggaagtgtttggggtttttgagcgagtgatttacgcgttgaattgttgtttttttaaatttttatggtttaaaaatttttttttttttttttgtaaaagaaatttagagattggtgatttgttatcgaagacgattttttaggcgttttttgtttttttaggtagttgggtcgttggcgtttttaggcggaagcggggtttttgggttgggtttttgttttgttaggaagcggtttgggggttgtttttcgggatttttagaattttggaaggagagagttggggttttatcgcggagattttcgagttttcgttgtttgggttcgagttgcgttttagggttatcgttgatggcgcgagattacgtatttttcgcgaatttcgatttttgaatagtttagaaagttcgtagattaaaaattaaataaaaaatattggtataatttttattgtcgtattggttttttttttattttaataaaaatacggtaatatgaagcgattatttttttaaaaatttgtttttaaagtataatattgaaaaggggtaaggtatagttttgtaaggtaatgagtttttcgtttttagaggtgtttaagtagacgttaggtttatagtggtatggagagtgttttttttttttggaattggatgagtttttagatttttgaaacgttgagtttttttttttttttttatttttatgtttattatattttaatttaatagtatataatttaagttgtttttttatggagagtcgcggttgtgttatttgtttgttttcgttatggagatcggagttaggtttgtagggaagtcggtgcgttttttttaagttttttgttcgttggtttttttcgggtttttcgggttttgcgtgtcgcggatttggattcggattgtagatatcgttttacgattgggttttcggttagattgttattttataggaggagggttttttaagtgtgtagaagaggaaagtttatttataaagtttttgttttttcgagttgaacgattttcgcgttcgaggtttagttgtgttttcgtcgggtttaggttgagtttattttatattgttttatagtcgggtagagatttcgcgagggtttgggagttttggtttcggaggattcgtcgttttgtaggtttgtttaagtaggcgttttcgcgagagtgcgggatagagagggtttggcggggttttttggcgttgagagtttttttttttcgttgtatttagttttgttaacggggttggatgagtgggggttggagttagaattttagggtttatattcgtcgatagtagtaatgtcgattcgttttgttttttttttaaggagcggagggaaggagttatgtgaatgattttagtttgattattaagagggcgttagtatttttgtttttttagagtgaaaaggttaaatcgatgggggtttttatatcgttggatataggtgcgttcgggcgtttagtgcgcgtaatatacgtttagatattttatatgtaaatatgtttgtcgtcgcggagtcggtcgggaggtagcgtttgttcgttggggttttgttagaagttattttgtttttcgttggtttaatattcgttttttgcggttttcgttcgtttcggcggttttcgaagcgttttcgggagggtttcggtttcgtcgaaaattgtagtttgttaggttgagtcgtcgcgcgttgggaggttaatagcgattgacgataaagggttaaggtgtaatttttaaagcggggattcgtcgggtgaggtagaaattagttttcggggagatgggtttttttttttcgacgcgtttttgtatatattgttgtttcggcgtcgggttttcgggcggggatttttttttcgggtatcgcggttttattcggcggagagttaggttttttttaggtttttaagtagggagcggacgtgggtggtggggaagggaagtcgtcggcgggacggagagtggggtttttcggattttgggtcgggtaggtttggcgttggtagttttgttgtatagatttgtgagcgatgttggtggtcgtattgtcgcgcggcgcgaattttaagtagattatttatgtttttattaataattttaaatattttattatatttatgttgtttgtttagagaaaataaaaggttatttttgaaatcgtttgaaatgtaataatatttattaaagcgttttttaattatgtgatttaattaagcgtggtgcgttcgcgttttcggttttcgttggaaaggttggcgatgacggttattattattgttgttgttagtggtttcgtgatagtagtcggttagttttttagtttaggtttagtttttttagagagattcggggagttttattttgagggatggggtttttcggaacgatttcgaagtttcggagattaggcgcggtttaggttttttgtttttttttagttttagttttagttttagttttagtttcgggtaaatttttttaggtcgagggtaggattttttttagatttttggggttttttgtgttttttggggacgttcgattcggttttttaggagggggaatttcgggttttgagttcgggtttcgtttcgttggttgtttcgttttttttagggttgagtttcgcgtaatgttcgaagtagaaataaagagtcgtcgagatttgttttttgggtcgtttttttatttttttagtttggaaggcgttttagagaggttttatttttagtttttacggagatttaggagggaagaagagtcgggattcggtagttttgaggggttgtcgggtttgcggcgtttttttcgtcgtagaggggttgggtgggagacgtaggcgggaaggattttgttttagtcgagagttttttgtggggtcgaggaatggtgaggattattgtttgtattaatcgtttggaagaaatcgggcggttagtcgttcgattttatttgtcgagatgtgaaatttggtcgcgcggttcgggcgcgcgttgtttgcgcggaaggagtcgtttttttttttttagcgaacgtattcggggtttttttttttcgttaagttttttgtttggaaggggattggtaggttttgtcgtcgtcgtgtgttttttttttttttttagtttttattttttttaattaatttttttttttttttttttttttttttttttttttggatgggtaattataggtttcgttgttaagcgcgttgcgaggagtcgttgttcgttttcgtcggtgttttttttcgcggtagtttggtcgagttcgtttagtttgtttaggacgtttttgattcgcgcgtttagttttatttagtggtcgtgggatgttgtatttgagttttttttttaggttaaaattttgtttcgaggtttttttgagagggttttattttttaata

SEQ ID NO: 85 - DNA, 4513 bp, Artificial Sequence
  chemically treated genomic DNA (Homo sapiens)
tgttggagaataaaatttttttagaaaaatttcgggataaagttttggtttaaaggaaaaatttagatgtaatattttacggttattgaatgaaattgagcgcgcgggttagggacgttttaggtaggttgggcggattcggttaggttgtcgcggggaggggtatcgacgggaacgggtagcggtttttcgtagcgcgtttggtagcggagtttgtgattatttatttagagagggaagaaaagagaagggaagaaaggaaagttagttggagggggtagaggttggggaaaggaggggggtatacggcgacgatagagtttgttagtttttttttagataaaggatttggcgggaggggggaatttcgaatgcgttcgttgaaaggagggaggcggtttttttcgcgtaggtagcgcgcgttcggatcgcgcggttaagttttatatttcgatagatggggtcgagcggttggtcgttcggttttttttagacggttggtgtaaatagtgatttttattatttttcgattttatagaggattttcggttgggatagggtttttttcgtttgcgttttttatttaatttttttgcggcggagaaagcgtcgtaggttcggtagttttttagggttatcgggtttcggtttttttttttttttgggttttcgtggaggttgggggtggggtttttttgggacgttttttaggttgagggggtgaaaaggcggtttaggaggtagatttcggcgattttttgtttttgtttcgggtattgcgcggggtttagttttggagggggcggaatagttaacggggcggggttcgggtttaggattcggagtttttttttttagaaagtcgggtcgggcgtttttaggggatatagagggttttaagggtttggagaaagttttgttttcggtttggaagagtttgttcggggttggggttggggttggggttggggttggagaagggtagagggtttgggtcgcgtttggttttcgggatttcggagtcgtttcggggaattttattttttaaagtggggtttttcgagtttttttgaggaaattgggtttggattgaagagttggtcggttgttattacgaggttattaataatagtagtaataataatcgttatcgttagtttttttagcgagagtcgagagcgcgggcgtattacgtttgattaaattatataattaggaggcgttttaatgaatattattatattttaggcgattttaagaatggttttttattttttttgggtaggtagtataaatataatgaagtgtttgagattattaataaaaatatgaatggtttatttggggttcgcgtcgcgcggtaatgcggttattagtatcgtttataaatttgtgtaatagagttgttagcgttaggtttgttcgatttagggttcgggggattttatttttcgtttcgtcggcggttttttttttttattatttacgttcgttttttatttggaggtttggagagggtttagtttttcgtcgaatggggtcgcgatgttcggaagaggggttttcgttcggaggttcggcgtcggggtagtagtgtgtgtaggggcgcgtcgggaaggggggatttattttttcggaggttgatttttgttttattcggcgaattttcgttttaggaattgtattttggttttttgtcgttagtcgttattaattttttagcgcgcggcggtttagtttggtaggttgtagttttcggcggagtcgggattttttcgggggcgtttcgggagtcgtcgaggcgagcggagatcgtagagggcggatattaaattagcgggagatagaatgatttttagtagaattttagcgaataaacgttgtttttcggtcggtttcgcggcggtaggtatatttgtatatagagtgtttgggcgtgtgttgcgcgtattggacgttcgggcgtatttgtgtttagcggtgtaggagtttttatcgatttgatttttttattttaggaaaatagaaatgttggcgtttttttggtggttaggttggggttatttatatggtttttttttttcgttttttaggagaaaggtagggcgggtcggtattgttgttgtcggcgggtgtagattttgggattttgattttagtttttatttatttagtttcgttggtagagttgggtgtagcggagaaggagggtttttagcgttaaggagtttcgttaggttttttttgtttcgtattttcgcgggggcgtttgtttgggtaggtttgtagggcggcgggtttttcgaggttaggatttttagattttcgcggagtttttgttcggttatggagtagtgtggagtaagtttagtttgggttcggcggggatatagttaggtttcgggcgcgggggtcgtttagttcgaaggagtaaggattttataaatgagttttttttttttgtatatttagggaattttttttttgtggggtaatagtttggtcgggggtttagtcgtggggcggtgtttgtagttcgggtttagattcgcggtacgtagagttcgggaggttcgagaggaattagcgggtagaggatttgggaaaggcgtatcgatttttttgtaggtttgatttcggtttttatggcgaaagtaggtaggtggtatagtcgcggttttttatgagggagtagtttagattatatgttgttggattaaaatgtaataaatataggagtaaaaaaaaaaaaaaaaatttagcgttttaagggtttgaggatttatttagttttaaagagaaagaatattttttatgttattgtaagtttagcgtttgtttgaatatttttgaggacggggaatttattattttataaagttgtgttttgtttttttttagtgttatattttgaaaatagatttttaaaaaaatgatcgttttatgttatcgtatttttattaaaataagagagaggttaatacggtaatagaagttgtgttagtattttttgtttggtttttaatttacgaattttttgaattgtttagaagtcggggttcgcggggaatgcgtggtttcgcgttattagcgatgattttggggcgtagttcgggtttaggtaacgagaattcgggagttttcgcggtgagattttagttttttttttttagggttttgaaaatttcgaggggtagtttttagatcgttttttggtagggtagaggtttagtttagaggtttcgttttcgtttgggaacgttaacggtttagttgtttggggaaatagaaaacgtttaaaaagtcgttttcggtaatagattattagtttttgagttttttttatagggagaagaaaaaaaatttttaagttatgaaagtttggaaaaatagtaatttaacgcgtagattattcgtttaaagattttaaatattttttgatgagcggaatttagaggcgcggttagtataggcgaagttgattttttttttaattttgtttaggaagttgtataaagttttttgttttgggggggaaataataaaaggtaaataaaaatgatattttgaaaaggagagtttttttgttttagtggagtaaaaagtttttgtttttaggggaaagcgtttcggtttagtacgggtggtagggttagtgagtatttagtcggagggagatttgttgaatttcgtaaaatttaaaaaaatgtagttattggaatagtatcgtagttttgaatatttttttttggtaataaaatgtgtattttttttggttattttgtgtttatatgtgatatatttaaattgttttatttaaaaaaaaataataattatttttcgttataaaggtatttggtatttgtttttaggcggggcgaaggttatgagtatttgagtattggggaggatgtttaggtagtttttttggatttagatatgtttagaaaatttattattttatttgggatttttagtattttataataaagagattttgttttatttaatgtaatttttaagaattttaatatataaaaatgcgggggtgggggtgtttataattttgataagtatagttgtaaatagaaatatttatttattttttataagattataaatatttgatattggaattgtaaaatgtatatgttttataaattaaaataataaagaaaataaaaaatagaaattaattttgttttttgttaaaaaggtatgttattttattgagttttttaagtagtagatggttatttagatttttaaattataatttttgtttttatatttttttttttaaaaaggtttatattattatgtataacgtaaaattattattgtaatgaaataaagaggtttaaggtaaagagcgaagtttatttttagtttttagggagattagcgggatttttagtttagtcgtgtgtatatttttgggttagtcgtgggtatattttttgggttgttttagttatagatggatagttggattggtttttttttatatatt

SEQ ID NO: 86 - DNA, 2280 bp, Artificial Sequence
  chemically treated genomic DNA (Homo sapiens)
tagtggcgagtattcgtcgttggttttttagggtaggtagtattgtcgttttaggcgtgcggagtcggggagaaaaaaatcgaatacgtgtgttatttagggtttttagataagttttttcgcgcgtatatatattttgaatcggagtttagaaggtcggattcgcgtttcggggtcgagttttttatttttcgtttttagttcggaagattttagtttgttcgaaggcggcgtttgattcgttggtggatttggtgggtgtttgtttttgatatttggggacgaggcgggagcgttttgagcgttgggaagtttcgtttcgcgagttttcggtagtgatacgtgggagcgttgggttcggtattttcgacgttttcgaggtttcgggtggtcgttttgttttttcgggggtttttattttttaagtggttttaaacgatcgaggatgggtttttcgcgtcgtcgtagttgttatttttttcgggaaaggttagcgattttggacgcgtaggttttgaaaattaaggtttagatttatatcgagcgtttaaagatcgtatttgaatttttttcgtcggttattgagggagagaaaggaacgtttagttttatttatatttatagaaagaagcgtcgagggtgggggaaacgtagttttgtcgggtgagtcgggataggtttttcgtttgtttttcggtcgttgtttttttttagttgaatggggagcgattcgtttcgggcgcggttttcggggttgaagattgaggtgtagttttattttcggtttggtagcggtttggaagagagagggaaaggaggaatatttattcggttaagagacgtcgttagagtttttaaagttggcgggggacggaggtcggggtttcggatttttagagcgttcgtagtcgggtttttgggtttttcggtgcggggaatttgattttgtagttttcgttagggcgcggcggggttgtaagaagggaggaaggagtgggattagagttttcgagggcgcgggcggcgtgtatttagttttgttttttcgcgcgttttgtcgtttgtttgttttttttgttgtatcgggtggttttggttttcgcgttcgttcgttttcgacgttttcgcgtggtttcgcgttgttcgcggttagtttcgtttcgtttcgtaaggagcgtgttgtttttttaatcgaaatgggattaagattttagggttttttcgtttttttgttttgaggtgataggattttagttaatagatcgaaaacgtgaaaagtattcgtcgttttttgttttaagtgtttttgtggaaggattatttatttggaaaagtagaataaattttgttgtcgtttttttttcggaggcgtgtttattttagagtttttagatttattggtattcgttatatttttttttgggttttataggtaggattttaagaatgatatgggggtatttgggtgatttgtgggttgtaggtttttaagaggtcgttttttcgtgtacggaagtgtcgtagttttattttagcggaagtaatattaaattttattttagaggtttgttttgtaaagaatttagagtttattatatttgatattattttaaaataatatttgtttgttttaagaagttgggagaaatcgataaaagaaaagttgaaatttatgttttttatttttattttaggagataattttgattaatagtttggtttgttttttatttttattttttaaaaataaataaataaataaataaattaaaatttattatatttttagattgtgtaggattacgtaggattttgtaaaaataaaaatgggattatattttattcgtttttgtaacggtttagtttttattagtaattattttttattagtatagtagaattaattttattttagtattattattattattttgagatagggttttattttgttatttaggttggagtatagtggtatgattttggtttattgtagtttttgttttttgggtttaagttgttttttcgttttattattcggttttttttttttaattagttgggattatagttatgcgttattaagttcggttaatttttgtatatttttgtggagataggttttattatgttgtttaggttgattttaaattattgaatttaagggatttatttattttggttttttaaattgttgggatggtagatttgagttattatatcggtaaatttattttttataatggttgcgtggtatagaatttttattttataggtgtg

SEQ ID NO: 87 - DNA, 2280 bp, Artificial Sequence
  chemically treated genomic DNA (Homo sapiens)
tatatttataaaatggaaattttgtattacgtaattattataaagaataaatttgtcggtgtggtggtttaggtttgttattttagtaatttgggaggttaaggtgggtggattttttgagtttagtagtttgagattagtttgggtaatatggtgaaatttgtttttataaaaatatataaaaattagtcgggtttggtggcgtatgattgtagttttagttagttgaggggaaggggtcgggtggtgagacgggaggatagtttgagtttaggaggtagaggttgtaatgagttaagattatgttattgtattttagtttgggtgataaagtgagattttgttttaaaataataatgataatattaaaataaggttaattttattatattgatagggaatgattattagtaggagttaggtcgttgtagaaacgagtgaagtataattttatttttatttttataaaattttacgtaattttatataatttaaaagtatagtgggttttggtttgtttgtttgtttgtttgtttttaaggaatgggggtagggagtaaattaaattgttgattaggattattttttagagtagaaatgggaagtatggattttaattttttttttatcgattttttttaattttttaaaataagtaagtgttattttaaaatagtgttaaatatagtaaattttggattttttgtaaaataaatttttaagataaggtttgatattgttttcgttaaaataaagttacgatattttcgtgtacgaaaaaacggttttttgaggatttgtaatttatagattatttaggtgtttttatattatttttgaaattttatttgtaaagtttaggaggaagtatagcgaatgttagtgggtttaggagttttggggtgagtacgttttcggaaggaaaacggtaatagaatttattttgtttttttaagtaaatgatttttttatagaggtatttgggataagaggcgacgggtattttttacgttttcgatttattggttaagattttattattttaaaataaggagacgaggaaattttgggattttgattttatttcgattgagaaaataatacgttttttgcgaagcgaaacggggttggtcgcgggtagcgcggaattacgcgaaggcgtcgggggcgggcgggcgcggggattagggttattcggtgtagtaaagggggtaagtaggcggtagggcgcgcggggagataaggttgagtgtacgtcgttcgcgttttcgaaggttttagttttatttttttttttttttttgtagtttcgtcgcgttttggcgaaggttatagggttaggtttttcgtatcgaggagtttagaagttcggttgcgggcgttttgaagattcgggatttcggttttcgtttttcgttagttttagggattttggcggcgttttttagtcgggtagatgtttttttttttttttttttttttaagtcgttgttaggtcgggggtgaggttgtattttagtttttagtttcgaaggtcgcgttcggggcgggtcgttttttatttagttaagaggaagtagcggtcggggggtaggcgaggaatttgtttcggtttattcggtaagattgcgttttttttattttcggcgtttttttttgtgaatgtgaatggaattaagcgttttttttttttttttaatggtcggcgaggagaatttaaatgcggtttttgggcgttcggtatgggtttggattttggtttttagagtttgcgcgtttaaggtcgttagtttttttcgaaggaagtgatagttgcggcggcgcgggaggtttattttcggtcgtttaaagttatttaaggaataaaagttttcgagagagtaaaacgattattcgaaatttcggaagcgtcgggggtgtcgggtttaacgtttttacgtgttattgtcggggattcgcgaggcgaagttttttagcgtttaaggcgttttcgtttcgtttttaggtattaggaatagatatttattaggtttattagcgggttagacgtcgttttcgggtaggttgggatttttcgaattgggagcggagagtaaggggttcgatttcgggacgcgagttcggttttttggatttcggtttagggtgtgtgtgcgcgcggaggggtttatttgggggttttgggtagtatacgtgttcggttttttttttttcgatttcgtacgtttggagcggtaatattgtttgttttagaaggttagcggcgagtgttcgttatta

SEQ ID NO: 88 - DNA, 3640 bp, Artificial Sequence
  chemically treated genomic DNA (Homo sapiens)
aatttttagaaattaatttgttataattttatgatatcgtaatattttttggaagagatatatgtggatgtttttatagtaagattttgtgataagtaatttttatgtttgtattaaaataattagattgttttgtgattggtttagttatttagtttaattttattattttaggaggaaattaaatttcgttagtattaatatatttgtattaaaataagaatttatataaatttattgatagaaggtaggaatttatgattgtgtattaaatttatttatataagaaatatttttttttttattggattttatgagattgatattttttatgtagaaataatgtggttttttttttttaaagatgtttatttattttatttaaatagagatataatgagagtattatttaataaatatttgttaaatgttttttttagtattataagaaatgtattttttaataattataattttagtaatattttttttttgttgttattttaggttgggggttatttaattttattaagagtgtggaaattttgttgttttaatggggattgaaaggaaattagttattttttatttaaattattaaggtttttagattgatttaaaatattaagtcggtgtttaaatattttaataaatggattttataaagagtataagtaatgttatttgaggaataaggttttaagttgaggagtaggatattggagagttttttttttaattatttatttttattagatttgaggattttttgttttataagaaaattagaaataaattttattggtatgttttgtaagaacgattttttttgataatttggggtagtagtatttgtttgattagttgaatttgttatgaatgtggaaataatgatattaaaatagttcgtgtaataatttttttaaagatttcgtagattagagatgattatagattttttttagcgcggattaaagggattgaattgaacgttttagtttaatgatttaatttttgttatatttatagggacgcgaatttcgattttataagtaggtgtgtacgtgtatttagatatttatataaagtcgcgtggagggacgaaaagattaattattcgatcgacgaggataggtttgattttttcgattattttagtgtgttagtgtatattttcggttgggtttagcgttttaagaaatttcggaattttagttgttaatttttgtttttttattatgattttttaaagatattttatttgtttatcggggcgaagagaaatgggattaggcgttagggcggtgggattttgtttagggttttgatttcgcgttagggttttagattagtcggttttcgaaggtttttttatttattttatataagaggaaataaagattttttagtttaaggttttagggttgttttttgatttcggttagtttgtaggaagaggaaataataaaataaaggaatcgttaattcgtcgggtattatattttttagttttaattttcgatttcggatcgttagggttattttttttacgttgatttcgttttttttaaatgaaaatacgttaataaaagtatatttcggatataaaatttaagtacgtattttttttggggaggttagagttgaggtgtatttcggaagatgagaattttgtttttatgaattgggtaatatttaggtattgttaggtatttcgatagattttttagatattttttttttttttttttatattttttttttattaaaatagttattgttttgaaatttattagaataacgacgttttaaaaataaaggcgtagtaagtattttttttttcgttgtcgcgggttgaattacggacgttcgcgggtcgtttagtttcgacggttcgtagggggcgcgcgtcgtagtcgtagtatagttcggttatttttagaaagggagtcgaatggagggaagtagggagcgcggagggttcgaggtttgtagataaggagaggcgtattttgggatttgggttttttgttgttataatataatcgtgttattgttggtattgttcgatttaagtgtcggtggtaagcggcgatgtcggggttgggtttttagtaatcgttgtgttttgggttaggttggtcgttttagttatcgggattttttttcggatgtttttagggcgataggtgttgtatttattgacgggatagtcgtatattttcgaataggtagtggagttcgtttttggtaggtattttagttgcgttgatattaaggtcgttatataatagttattagttttttttaagttttagaagtaggttttttttgttttagttatagcggttttagtcgtcgttacgagtttattttttatttttaagcgtatttttttttttttattcgggtttatgttcgttatatagagagaattatatagggggaattatggttttatattttcgaggggatagatatcggtcgtgagataggtattacgtagagttttttggtgattgttcgtaggagcgagattttttttggttttgtagtcggttaggtgtgtgtgtgtgagggtttttagttgattatcgggatgtattgttatttttcggtttggcgggttttgggattttttggttttcgtaggaggttattttaggttttcggaggaggcgtttttagttggcggcgtttttcgtttcgggtttagaggcggatacggtcggtcgcgttttgttggttttttgttcgcgtcgtagcgggttgggagtagttgcgcgatattagatttatagcgttaagacgcgaagcgcgaggaaatcgttgcgtttgatttttttttttttaatttttggatttaggaacgtttttagtttttgcgttttatacgtttagttttggtttttttttcggtttagaagtttttaaggattgaagggttttgtttagggtttcgtatttttgtttgatttttatggtttagaaaagtagggggatatttgaaatgttatttcgggataaatattaataaaaaagtaaatggatttgtgtaggggttagttattaattaattaggtcgtaaggttatttagggtaaatatagtttaggttgggttgggcgagatttttttatggtcgtttttcgatcgaatttttttttttttggtttaggttttttttaggtcgttttggggtaaatatcggacgggaagggggcgtcgttaattttttcgcggggtttggaggttttttcgtttttaagtttcgtagggtagggtcggagtgtttaatatttattttcgttcgaatttcgggtttgcgcgtcgtttttttttgggttcgcggtgttgcgtttgttgttgggtgtgtgtcgttgttttttttcgagtcggtagtttttgttgtgtggtcgaagttttttggaatttttaattggaaattaattttggttttgatagacgtttacgttagaggcgcgttatttatttatatttttcgttttatttcggaggagacgcggcgagaattttgtcgttttgttttttaatggggtagtagtaagtagtatatggagggaatatatattgatttttaaaaggtagttaatttggtgggaatttttttttgtcgtttt

SEQ ID NO: 89 - DNA, 3640 bp, Artificial Sequence
  chemically treated genomic DNA (Homo sapiens)
agggcgataggaggaaatttttattaaattaattattttttaaaaattaatatatgttttttttatgtattatttgttgttgttttattaaagagtagagcgatagggttttcgtcgcgtttttttcgggatgaggcggggggtgtgggtgggtggcgcgtttttgacgtgggcgtttattaagattaagattagtttttaattaaagattttagagggtttcggttatatagtaggagttgtcggttcggaaagagatagcgatatatatttaatagtaagcgtagtatcgcggatttaggggaaggcggcgcgtaggttcgaggttcgggcgggggtgggtgttgggtatttcgattttgttttgcgggatttggaggcgaggaaatttttaaatttcgcgggggagttggcggcgtttttttttcgttcggtgtttgttttagaacgatttaagaaggatttgagttaaggggggaggggttcggtcggggggcggttatgagaaagtttcgtttagtttaatttgggttgtgtttgttttgagtggttttgcggtttggttgattgataattggtttttgtataagtttatttgtttttttgttaatatttatttcggggtgatattttaaatgtttttttgtttttttgggttatgggagttaggtaggagtgcggggttttaggtagagttttttaatttttgaagatttttgggtcgggagagaagttaggattgggcgtgtgggacgtaggagttggaagcgtttttgggtttaagagttgggggagaaggagttaagcgtagcggttttttcgcgtttcgcgttttggcgttgtgggtttggtgtcgcgtagttgtttttagttcgttgcggcgcgaataaagggttagtagggcgcgatcgatcgtgttcgtttttgagttcggggcgaggggcgtcgttagttgggagcgtttttttcgaaggtttaggatggttttttacggagattaaggagttttagagttcgttaggtcgaaaagtggtagtgtatttcggtagttaattggggatttttatatatatatatttagtcgattgtaaaattaaaaaaggtttcgtttttgcggatagttattagaaggttttgcgtggtgtttgttttacggtcggtgtttgttttttcgagggtgtaggattatagttttttttgtgtagttttttttgtgtaacgggtataaattcgggtgaggagagggaggtgcgtttggggataagaagtgggttcgtggcgacgattggaatcgttatggttggggtaggggaaatttatttttggggtttaaggggggttgatggttattgtgtggcgattttggtgttagcgtagttaggatgtttgttagagacgaattttattatttgttcggaggtatgcggttatttcgttaatgggtgtagtatttatcgttttggaagtattcggagagggatttcggtagttggggcgattagtttgatttagggtatagcggttgttagagatttagtttcgatatcgtcgtttattatcgatatttgggtcggatagtgttaataatagtacggttgtgttgtagtagtagaggatttaaattttaggatgcgtttttttttatttgtaagtttcgagtttttcgcgttttttgtttttttttattcggttttttttttgggggtagtcgggttgtgttgcggttgcggcgcgcgttttttgcgggtcgtcggggttgggcgattcgcgagcgttcgtggtttagttcgcggtagcgaagaaagggatgtttgttgcgtttttgtttttagaacgtcgttgttttagtgaattttaaaataataattattttgataggaagaaagtgtgaaggaggaagagaaggatatttagagggtttgtcggggtatttaataatgtttgggtgttatttaatttatgaaaataaaatttttatttttcgaagtatattttagttttaatttttttaaaaaagatgcgtatttggattttgtattcgaagtatgtttttgttggcgtgtttttatttaagaaaagcggggttagcgtagagaaggtgattttggcggttcgaagtcggaggttggagttgagggatataatattcggcggattggcggtttttttgttttgttgttttttttttttgtaaattgatcggagttaggaggtagttttgaggttttgagttgagaagtttttgtttttttttgtgtggggtgggtgaaagggttttcggaggtcgattggtttggagttttggcgcggagttaggattttggatagggttttatcgttttgacgtttggttttattttttttcgtttcggtaggtagatagaatgtttttgggaagttatagtaagaaaataaaaattaatagttaaagtttcgaagttttttagggcgttaggtttagtcgggaatatatattggtatattgaggtaatcgaaaagattaaatttattttcgtcgatcgggtggttgattttttcgtttttttacgcggttttgtgtgagtatttgagtgtacgtgtatatttgtttataaaatcggaattcgcgtttttgtgggtgtgataggggttggattattaagttaaaacgtttaatttagtttttttgattcgcgttggggaaaatttatagttatttttaatttacgaggtttttaaggaggttgttatacgagttgttttgatgttattatttttatatttatggtaaatttagttaattaaataaatgttgttattttaagttattagaagaaatcgtttttatagagtatattaataaaatttatttttgatttttttgtaagatagaaaatttttaagtttaataaaggtgggtaattaagaaggaggttttttaatattttgttttttagtttgaggttttgttttttaagtgatattgtttgtgttttttgtaaagtttatttattggaatatttaaatatcgatttaatattttaaattaatttaggagttttgatggtttgaatgagaaatgattagtttttttttagtttttattaaaatagtagaatttttatatttttggtaaaattgaatggtttttaatttagggtagtaatagaaggaaggtgttattgaagttgtggttgttagagggtgtattttttataatgttggagaaaatatttaataaatatttattaaataatatttttattgtgtttttatttgaataagatggataagtatttttgggagaagaaagttatattatttttatataaaaaatgttagttttatagagtttagtaaaaagaaaaatattttttatgtgaatggatttagtgtataattataaatttttattttttattaataggtttgtataggtttttattttaatataagtatgttaatattaacgaagtttaatttttttttgagataataagattgggttaggtgattagattaattataagataatttgattattttgatataaatataaaaattatttattatagggttttgttatagaagtatttatatatgttttttttaagagatgttacggtattataaaattgtaataaattaatttttagaaatt

SEQ ID NO: 90 - DNA, 3240 bp, Artificial Sequence
  chemically treated genomic DNA (Homo sapiens)
gaaattgaggtataaggtagtaatgattattgagggttttgttttcgtttttttaggtgaggagtttattttaggggttttagtttgaaagtttagaggcgaggggcgcgtattataatttttagaggttttcggatttaagggcggttttcgtttttcgtttttttcgcgcgacgaagtcgggtttattaatgggagttcggagtggggcgagtaggggcgggacggggcgggattgcggggaggtggtcggcgggtcgcgtcgcgagttagtattttagagagcgcggggttcggatagtcgcgcgttgagggtttcggggcgggcgtcgcgggattttttcgggttatgggtaagcggttttgcggcgcggttcggataggggttcggcggttttgtagggaggtttaaggtgtcggcgtcgggttttttttagttttcgtggtagtcggtgcgttgtgtggggcggagaggggttcggggtgggtttcggggcgcgggttaaggggagcgagttcggttcgcggttttagcgtttttcggtcggcgcggaaggggtgaggttgggcgttcgcgcgagtttcgagaaaaggaaagataaaaagttttggcggttaggggtttttcgggcgtttatttcgaaatttttttcgtcgttttttgtttgaaatatgtcgagttcggtacggttttgtcgttttattttttgttgcggtttttatttcgagttgggtttagttaatttgttgtgatagttgtcggtagtcgttttttcgtttcgtgatatttcgtaggttttagaatcgcggcgtcgtcgggtatagatttcgggtttagagcgcgcggtttttttttttgcggtcgtcgttttttgaaaggggttgcgcgggtgtgaagaatttgtttaatgcgttttgtaggatttattgtttttttttcggtcgcgggttgcgtcgatggttcggggagttcggtttttcgttttttgtttttttttttttttttttttttttttttttttttttgttttttcgtttattcgtcgtagttttataggagaggggtcgtttttttggttgttttttttttttgttttttgtgtgtttttttgttttttttcggtttgtagaagggacggggtggcggttggggagcgttaggggaagagggtaagagcgtgggttacgagtttgtaggcgatgttcggtttcgcgttcggcgggagttgcgggttaattcgggttcgcgtttcgttttttcgcggtgtttaggggtcgttcgggttggggtcgcgttatttttcgtttagcgtcggcgtggtggggtttgcgcggtgtaggattttcgagggtttagggggttttaaggcgttgcgggtttagtgtttttttgtttgtagagttttgggttagtaaggagtgtttcgcgggttttaggggaggataataggtgttttttgttttattcgggtttttttggtgggagtttatacgtacggtggcgttattgcgtttataggtaacgttagagtataggaggggtgggaggtcggggttcgagggttttatttcgtagtagagtttagagtttaatttaggttttagggattcgtttggggtttagaatttggtgtggtagaggtagaaagggttttcgataatttgtttttatagttgagagacgttaattggtatttttgagtttttgtttcgtaggtgaaatgggaatatacgaaattatttgaggagtttttattgttcgttattattaaatgtggtttagatttcgtggggagggatagttttattttggaattggggtttttaggatattttagagttcggtaagagggatagggagaatggggtttggaagttggtagttttatatttagtgtttttcgtatttttttttttttttgtattttttggtggtttttgtggttttagttgtttttagattttgtttttttcgtttttttttaagttgaggtattgaggttgggttgtggtttgagttgtatttgtgttttgttagggagtgggggttttaggtttatcgcgtttttttttattgttggttttagtttaatatttggtaggtttttttttttaaattgttggagtaagttcgcgtagattcggtttggtcgtcgttttcgggttgtcgagtggatcggtcgtttcgtcgttttaaaggttgtttttgttttgttttagtttaagtttagagaaatttaagttaataattttagtcgagggggcggggcggcgtttgttggttgttattgaggttgttgttattattattgtggtaattgacgtagtgtttttagtcggtgattttttatgaaaggaagtgttattttttttttattatatttagggtgagtggggcgggtagtagaaagatggggagggagagaaggaaaggggtgtgtgtttttagtagatttttaaatttgagagttgtgtggttttgtattagttattgtttttttttgggtaataggggtttgtaagtttattgcgtttattttgtatttaggaggttgatgttttcggagtatttgttgggtagcgaggtgttttggggagggagtaggataggtaggtttttgatttttttattgagtttggttgtggtttgtgggggaagttttttttttttttttatttttttttgttgagaatattgggtatattgagtttagtacgtttattttgtagatggggaaagggagatatagaattagtgattaatttggtaagaggtgtagttatgtagtgttggaattttttgttttatttgtttttttggtttatttttatttgtttttagtttgatgtttggtagggtaggggtttattgattttttcgtatttatttattgtttggttttatagttattttttagttttggttaagtttcgtgagatattttaagtttgtttttagtgatttttaattatcgttcgattgtttttatttttttgtttttgtatatttgtttttgtttcgttaggttggttgggttttggttagagttggttttttatttttttaggtaataggtagtagttttttaaatggaattttagtaggtattaataggttttttttttttttttaagattatggagataatattttttatttaaagatggtgggttttttgggtttttttcgatttaggttagggaagttgatttatagagtgtgggggttatgtttttttt

SEQ ID NO: 91 - DNA, 3240 bp, Artificial Sequence
  chemically treated genomic DNA (Homo sapiens)
ggaaggggtatggtttttatattttatgaattaatttttttggtttgggtcggggagggtttagaggatttattatttttgaataaggggtgttatttttataattttgaggaaggaggaaagatttgttgatatttattgagattttatttaaaaaattgttatttgttatttgagagagtagggggttagttttggttagggtttaattaatttggcgaagtaaaggtaggtatgtaaaggtaggaaggtgaaggtagtcgggcggtggttgagagttattgaagataaatttaagatgttttacggggtttagttaggattagaaggtagttatggggttaggtagtgggtggatgcggggaagttagtgggtttttgttttgttagatattaagttggaagtagatgaaagtgggttaagaggatagatggggtaaggggttttagtattgtatggttgtattttttattaagttggttattggttttgtatttttttttttttatttataagatgggcgtgttagatttaatgtgtttaatgtttttagtagaaaaaagtgagaagagaaaggaggttttttttataaattatagttaggtttagtgagaagattagaggtttgtttgttttgttttttttttaaggtatttcgttgtttagtaggtgtttcggaaatattagttttttgggtgtaggatgagcgtaatggatttatagatttttgttgtttagagaggggtagtgattagtataaggttatatagtttttaagtttaagggtttgttggaggtatatatttttttttttttttttttttttatttttttgttgttcgttttatttattttgggtgtgatgggaaggaagtgatatttttttttatgaaaagttatcgattgggaatattgcgttaattattataataatggtaatagtagttttaataataattagtagacgtcgtttcgttttttcggttgaggttgttggtttaagtttttttaagtttgagttggagtaaaataaagatagtttttgaagcggcgaaacggtcggtttattcggtagttcgggagcggcggttaggtcgagtttacgcgagtttgttttagtagtttggggaggggggtttgttaagtgttgagttggagttagtagtgagaagaaacgcgatgggtttgggatttttattttttaatagggtataggtgtagtttaagttatagtttaattttagtattttagtttgggggagggcgagagagatagggtttgggggtagttgaggttataagagttattagagggtatagaaagggaaggaggtgcgggggatattgaatgtgaggttattaatttttaagttttattttttttgttttttttatcgggttttgggatgttttaaaagttttagttttaggatgggattgtttttttttacggagtttgggttatatttggtggtgacggatagtgagagttttttagatggtttcgtgtgtttttattttatttacggggtagaggtttagaggtgttagttgacgttttttaattgtagaagtagattatcggaggttttttttatttttgttatattaagttttaggttttaggcgggtttttaaggtttggattgggttttgagttttgttgcggggtgaagttttcgagtttcgattttttattttttttgtgttttagcgttgtttgtaggcgtagtgacgttatcgtgcgtgtgggtttttattagaggagttcgggtggggtaagaggtatttgttgtttttttttggggttcgcggagtattttttattggtttaagattttgtaaataaagggatattggattcgtagcgttttgggattttttgggttttcgggggttttgtatcgcgtaagttttattacgtcggcgttgggcggagggtgacgcgattttagttcgggcgatttttagatatcgcggagggacggagcgcgggttcgggttggttcgtagttttcgtcgagcgcgaagtcgggtatcgtttgtaagttcgtagtttacgtttttgttttttttttttgacgttttttagtcgttatttcgttttttttgtagatcgagggaagataaggggatatataagggataggagaggagagtaattagggaagcgattttttttttgtggggttgcggcgggtgggcggagagataggagaggaaaagagaaaagggaagagaaggaaggggtagggggcgagaagtcgggtttttcggattatcggcgtagttcgcggtcgaaagaggaatagtggattttataaagcgtattgagtaagttttttatattcgcgtagttttttttaggaaacggcggtcgtagaggaaagggtcgcgcgttttggattcggagtttgtgttcggcggcgtcgcggttttgaaatttgcgggatgttacggggcggaggggcggttgtcgatagttgttataataaattagttgagtttagttcgaggtggaaatcgtagtaggaagtgggacgatagagtcgtatcgggttcggtatattttaggtaagagacggcgaaaagagtttcgagataaacgttcgggaagtttttggtcgttaaaattttttgtttttttttttttcgaagttcgcgcggacgtttagttttatttttttcgcgtcggtcggggagcgttgaagtcgcgggtcgggttcgttttttttggttcgcgtttcgaaatttatttcgggttttttttcgttttatatagcgtatcgattgttacgagggttggaggggattcggcgtcggtattttgaatttttttgtagggtcgtcgagtttttgttcgggtcgcgtcgtagagtcgtttatttatggttcggagaggtttcgcggcgttcgtttcgagatttttagcgcgcggttgttcggatttcgcgttttttgagatattggttcgcggcgcggttcgtcggttattttttcgtagtttcgtttcgtttcgtttttgttcgttttatttcgggtttttattggtaagttcggtttcgtcgcgcggagaaggcggggggcggggatcgtttttgagttcggggatttttgggaattgtagtgcgcgtttttcgtttttaggtttttagattggagtttttggaataggttttttatttagaggagcggaggtaggatttttagtaattattgttgttttgtgttttagtttt

SEQ ID NO: 92 - DNA, 2155 bp, Artificial Sequence
  chemically treated genomic DNA (Homo sapiens)
tttttttttttttttatttttggagggttttagttattagttttgaagttgtagcgagagttatttattgttttggtttttgggattttttgagtaggagaaaaaaattagaaaattaaaagagagagagagatttggaaggaagaagtaatggaggagggagatagggggaacgagaggggagtttatattatagagagagaattttttaaaggaagcgtaggcgtttacgggataggagcgcggaagaaaagagtagaaaaggaaaagtagttttaagtaagagaaagtaaggagaggcggatagggaggggaagagttaagagaagttaagttgagggatttgtagtaattttgagaaataaaagtgaattgtttgtgggcggttgttgtgattttagtaaaaagcggagtttaaggtttagggatttcgtcgtttatattgtgtttcgttttattttggatgtttttaattttagttttaggtatagtatacgagtaggggtagtaaggtttggttagggtcggtgtcgtacgggagttgcgggtttttgtaatatttaggtgtgtaggcgttataagaaggagtcggggtcgttgttttcgtagcgcggatttcgtttcgtgttgtatacgttttagaagagcgtgttcggaagtgtttttttcggtttttttcgttttttaagatttgtttgtaacgtttatattcgttattatcgtataagtattagggtgaggaggtttttttgtaggaattaatatcgattttagttttttgtttttttaaagtttttttttgacgatggcgagatttatattttaagttagaagaaaataaaattttgtttattttgggtttatgattgtataaaatttaaaatgttgtcggtatgaagatgtagttggaagattttagaaatttagtattaggaggtagagattttatagtgtttagagatgagtttttaaataaattaagaattacgtagtgggaaattaaggaggagggtttgaggggtcgattttagagggatagatagagaaatcgagagcgaaatatttaaggaagtggaataaatcgtcgtagttaggcgtttttgttttttcggaaattcgaaattcgtttaaattttattttaggcgtttacggtattagtcgtagggtttcgtattataggggttgttattttttgttttcggagtttttacgtcgagatttattatttgttggtttttttttttttttttttttttgtttttttattttttaaatataagataaaaatatattttatttattattatagatatatatattttatttttattatataaatataaaatatttaaatatttaaaatatttagaataaagttagtagtttggatttagtgatatttattcgcgtttgaatcgtttattattttttttattatttgtttagaaaaaaaaaaaagatgaaaaagagggggagagttttcgacgtaaataatttataataaaattattattttaaaaaagtgtttttcgtttgttttagatggatgaatatattttagatattgcggtatttcgtagtttgggtttgtgattttggttaaaatgtgggtggtcgtggttgtagggacgatcgtcgttgcgtagggtaaggaaagagggtgtcgcggttcgtgttttgatttgggattattgaaattttaagattggggaggcgaggggagtgttttttttattaattatataagacgttatttggatttcgagattattgttagaggaggttcgattatttagcggcgtttttgttttttttttcgtaaagaattgtttagaaatttagacgttttttgcgtgtaggaagggttttgtgaattcgggtgtttgggagaggaggtaatgagtgttgattcgttttttaaatcgagtaattgtgttcgaagttacgcgtttgggaggtcgtagggtgaagcgtcggttgcgtaggttatcgtcggtagtcgttttgtttttttttggaggagtgggaagttgtcggttatcgtttcgaataggttcggagaaaagattttgaattttttttgattagcggcgttatttttttttttgttttttttttattaaatttttgtttaaagttataatatttagaatt

SEQ ID NO: 93 - DNA, 2155 bp, Artificial Sequence
  chemically treated genomic DNA (Homo sapiens)
ggttttgggtgttgtaattttaaataggaatttaatgggggaaaagtaaaggaaaaggtaacgtcgttaattaaaggaaatttagaatttttttttcgagtttgttcggggcggtggtcgatagttttttatttttttaggaaagagtaaagcggttgtcggcggtagtttgcgtagtcggcgttttattttacggttttttaggcgcgtagtttcgggtataattgttcggtttggaaaacgagttagtatttattgtttttttttttaaatattcggatttataaaattttttttgtacgtaggaaacgtttggatttttgagtagttttttgcggaaggggaggtagggacgtcgttgggtggtcgggttttttttagtagtagtttcggagtttagatagcgttttgtgtgattgataggaaagatatttttttcgtttttttagttttagggttttagtggttttaaattagaatacgaatcgcgatattttttttttttattttgcgtagcggcgatcgtttttatagttacggttatttatattttaattaaaattatagatttagattgcgaggtgtcgtagtgtttagaatgtatttatttatttgaagtaagcgaaaaatatttttttaaaatagtaattttattgtaaattatttacgtcggaaatttttttttttttttttattttttttttttttttaggtaaatagtgaagaaaataatgaacgatttaaacgcgggtaggtgttattgaatttaggttattaattttgttttgaatgttttggatatttggatgttttgtatttatgtggtgagagtgaaatatatatatttatgatgataaatgaggtgtatttttgttttatatttgaaggataaaaaaataaaagaagaaaaggaagaaagagttagtaaatgatgagtttcggcgtggggatttcgggggtagagggtggtagtttttatagtgcggggttttgcgattggtatcgtgagcgtttgggatgaggtttgggcggatttcgggttttcggagaggtagagacgtttggttacgacgatttgttttatttttttgagtgtttcgttttcgatttttttatttgtttttttgaggtcggttttttagatttttttttttaattttttattgcgtaatttttagtttatttaggaatttatttttgggtattataaagtttttgttttttaatgttaggtttttagagttttttagttgtatttttatgtcggtagtattttggattttgtgtaattatgggtttagaataggtaaggttttatttttttttgatttagaatataagtttcgttatcgttaaagagaaattttgaaggagtaggagattgaaatcgatattaatttttgtaaagagatttttttattttggtgtttatgcggtggtgacgggtgtagacgttgtaaataaattttgggaagcgaggagggtcggggaggatattttcggatacgtttttttaaagcgtgtgtagtacggggcgaagttcgcgttgcgggggtagcggtttcggtttttttttgtagcgtttgtatatttgggtgttgtagggattcgtagttttcgtgcggtatcggttttagttaggttttattgtttttattcgtgtattgtgtttgaagttgaagttggaggtatttaaaataaggcggggtatagtgtgggcggcggagtttttgagttttgagtttcgttttttgttgagattatagtagtcgtttatagatagtttatttttattttttaaagttgttgtagattttttagtttggttttttttggttttttttttttttgttcgtttttttttatttttttttgtttgaaattgtttttttttttttatttttttttttcgcgtttttgtttcgtaaacgtttgcgttttttttaaggagttttttttttgtggtgtgggtttttttttcgttttttttgttttttttttttattattttttttttttaggttttttttttttttttggttttttggttttttttttttgtttaaggggttttaaaggttaaggtagtgggtggttttcgttgtagttttaaggttggtggttgggattttttaggggtgagaaggaagggaga

SEQ ID NO: 94 - DNA, 4513 bp, Artificial Sequence
  chemically treated genomic DNA (Homo sapiens)
agtgtatggggaaagattaatttaattgtttatttgtggttgggatagtttagggggtgtgtttatggttgatttaggggtgtgtatatggttgagttgggagttttgttggtttttttgaggattgagggtgaattttgttttttgttttaaatttttttattttattgtagtaatagttttatgttgtatataatagtgtaaatttttttaaaaaggaaagtataaaaataaaagttgtaatttaaaagtttgaataattatttgttgtttaggaaatttaatgaaatgatatgtttttttagtaggaagtaaagttggtttttgttttttgttttttttgttgttttagtttataaaatatgtgtattttatagttttagtattaaatatttataattttatgagaaatgaatgaatgtttttatttataattgtgtttattaaaattgtgaatatttttatttttgtatttttgtgtgttgaaatttttgaaggttatattaaataaaataaaatttttttattataaaatattgaaggttttaggtggaatgatgagttttttaagtatgtttgagtttagaggaattgtttgggtattttttttagtatttaggtgtttatggtttttgttttgtttgggagtaggtgttaggtgtttttgtagtgagaggtgattattatttttttttaaataagatagtttggatatgttatatgtgagtatagaataattaaaagaagtatatattttgttattaggaggaagtgtttaaaattatggtgttattttagtgattatatttttttaaattttgtgaagtttaataggtttttttttggttgggtgtttattggttttgttatttgtgttggattgaggtgtttttttttggggataggaattttttattttattgagataaagagatttttttttttaaagtgttatttttgtttattttttgttgttttttttttaaaataaaagattttgtataattttttaagtaggattgggggagggattagttttgtttgtgttgattgtgtttttggattttgtttattaggaagtgtttggggtttttgagtgagtgatttatgtgttgaattgttgtttttttaaatttttatggtttaaaaatttttttttttttttttgtaaaagaaatttagagattggtgatttgttattgaagatgattttttaggtgttttttgtttttttaggtagttgggttgttggtgtttttaggtggaagtggggtttttgggttgggtttttgttttgttaggaagtggtttgggggttgttttttgggatttttagaattttggaaggagagagttggggttttattgtggagatttttgagtttttgttgtttgggtttgagttgtgttttagggttattgttgatggtgtgagattatgtattttttgtgaattttgatttttgaatagtttagaaagtttgtagattaaaaattaaataaaaaatattggtataatttttattgttgtattggttttttttttattttaataaaaatatggtaatatgaagtgattatttttttaaaaatttgtttttaaagtataatattgaaaaggggtaaggtatagttttgtaaggtaatgagttttttgtttttagaggtgtttaagtagatgttaggtttatagtggtatggagagtgttttttttttttggaattggatgagtttttagatttttgaaatgttgagtttttttttttttttttatttttatgtttattatattttaatttaatagtatataatttaagttgtttttttatggagagttgtggttgtgttatttgtttgtttttgttatggagattggagttaggtttgtagggaagttggtgtgttttttttaagttttttgtttgttggttttttttgggttttttgggttttgtgtgttgtggatttggatttggattgtagatattgttttatgattgggtttttggttagattgttattttataggaggagggttttttaagtgtgtagaagaggaaagtttatttataaagtttttgtttttttgagttgaatgatttttgtgtttgaggtttagttgtgtttttgttgggtttaggttgagtttattttatattgttttatagttgggtagagattttgtgagggtttgggagttttggttttggaggatttgttgttttgtaggtttgtttaagtaggtgtttttgtgagagtgtgggatagagagggtttggtggggttttttggtgttgagagttttttttttttgttgtatttagttttgttaatggggttggatgagtgggggttggagttagaattttagggtttatatttgttgatagtagtaatgttgatttgttttgttttttttttaaggagtggagggaaggagttatgtgaatgattttagtttgattattaagagggtgttagtatttttgtttttttagagtgaaaaggttaaattgatgggggtttttatattgttggatataggtgtgtttgggtgtttagtgtgtgtaatatatgtttagatattttatatgtaaatatgtttgttgttgtggagttggttgggaggtagtgtttgtttgttggggttttgttagaagttattttgttttttgttggtttaatatttgttttttgtggtttttgtttgttttggtggtttttgaagtgtttttgggagggttttggttttgttgaaaattgtagtttgttaggttgagttgttgtgtgttgggaggttaatagtgattgatgataaagggttaaggtgtaatttttaaagtggggatttgttgggtgaggtagaaattagtttttggggagatgggttttttttttttgatgtgtttttgtatatattgttgttttggtgttgggtttttgggtggggattttttttttgggtattgtggttttatttggtggagagttaggttttttttaggtttttaagtagggagtggatgtgggtggtggggaagggaagttgttggtgggatggagagtggggttttttggattttgggttgggtaggtttggtgttggtagttttgttgtatagatttgtgagtgatgttggtggttgtattgttgtgtggtgtgaattttaagtagattatttatgtttttattaataattttaaatattttattatatttatgttgtttgtttagagaaaataaaaggttatttttgaaattgtttgaaatgtaataatatttattaaagtgttttttaattatgtgatttaattaagtgtggtgtgtttgtgtttttggtttttgttggaaaggttggtgatgatggttattattattgttgttgttagtggttttgtgatagtagttggttagttttttagtttaggtttagtttttttagagagatttggggagttttattttgagggatggggttttttggaatgattttgaagttttggagattaggtgtggtttaggttttttgtttttttttagttttagttttagttttagttttagttttgggtaaatttttttaggttgagggtaggattttttttagatttttggggttttttgtgttttttggggatgtttgatttggttttttaggagggggaattttgggttttgagtttgggttttgttttgttggttgttttgttttttttagggttgagttttgtgtaatgtttgaagtagaaataaagagttgttgagatttgttttttgggttgtttttttatttttttagtttggaaggtgttttagagaggttttatttttagtttttatggagatttaggagggaagaagagttgggatttggtagttttgaggggttgttgggtttgtggtgttttttttgttgtagaggggttgggtgggagatgtaggtgggaaggattttgttttagttgagagttttttgtggggttgaggaatggtgaggattattgtttgtattaattgtttggaagaaattgggtggttagttgtttgattttatttgttgagatgtgaaatttggttgtgtggtttgggtgtgtgttgtttgtgtggaaggagttgtttttttttttttagtgaatgtatttggggttttttttttttgttaagttttttgtttggaaggggattggtaggttttgttgttgttgtgtgttttttttttttttttagtttttattttttttaattaatttttttttttttttttttttttttttttttttttggatgggtaattataggttttgttgttaagtgtgttgtgaggagttgttgtttgtttttgttggtgtttttttttgtggtagtttggttgagtttgtttagtttgtttaggatgtttttgatttgtgtgtttagttttatttagtggttgtgggatgttgtatttgagttttttttttaggttaaaattttgttttgaggtttttttgagagggttttattttttaata

SEQ ID NO: 95 - DNA, 4513 bp, Artificial Sequence
  chemically treated genomic DNA (Homo sapiens)
tgttggagaataaaatttttttagaaaaattttgggataaagttttggtttaaaggaaaaatttagatgtaatattttatggttattgaatgaaattgagtgtgtgggttagggatgttttaggtaggttgggtggatttggttaggttgttgtggggaggggtattgatgggaatgggtagtggttttttgtagtgtgtttggtagtggagtttgtgattatttatttagagagggaagaaaagagaagggaagaaaggaaagttagttggagggggtagaggttggggaaaggaggggggtatatggtgatgatagagtttgttagtttttttttagataaaggatttggtgggaggggggaattttgaatgtgtttgttgaaaggagggaggtggttttttttgtgtaggtagtgtgtgtttggattgtgtggttaagttttatattttgatagatggggttgagtggttggttgtttggttttttttagatggttggtgtaaatagtgatttttattattttttgattttatagaggatttttggttgggatagggttttttttgtttgtgttttttatttaatttttttgtggtggagaaagtgttgtaggtttggtagttttttagggttattgggttttggtttttttttttttttgggtttttgtggaggttgggggtggggtttttttgggatgttttttaggttgagggggtgaaaaggtggtttaggaggtagattttggtgattttttgtttttgttttgggtattgtgtggggtttagttttggagggggtggaatagttaatggggtggggtttgggtttaggatttggagtttttttttttagaaagttgggttgggtgtttttaggggatatagagggttttaagggtttggagaaagttttgtttttggtttggaagagtttgtttggggttggggttggggttggggttggggttggagaagggtagagggtttgggttgtgtttggtttttgggattttggagttgttttggggaattttattttttaaagtggggttttttgagtttttttgaggaaattgggtttggattgaagagttggttggttgttattatgaggttattaataatagtagtaataataattgttattgttagtttttttagtgagagttgagagtgtgggtgtattatgtttgattaaattatataattaggaggtgttttaatgaatattattatattttaggtgattttaagaatggttttttattttttttgggtaggtagtataaatataatgaagtgtttgagattattaataaaaatatgaatggtttatttggggtttgtgttgtgtggtaatgtggttattagtattgtttataaatttgtgtaatagagttgttagtgttaggtttgtttgatttagggtttgggggattttattttttgttttgttggtggttttttttttttattatttatgtttgttttttatttggaggtttggagagggtttagttttttgttgaatggggttgtgatgtttggaagaggggtttttgtttggaggtttggtgttggggtagtagtgtgtgtaggggtgtgttgggaaggggggatttatttttttggaggttgatttttgttttatttggtgaatttttgttttaggaattgtattttggttttttgttgttagttgttattaattttttagtgtgtggtggtttagtttggtaggttgtagtttttggtggagttgggatttttttgggggtgttttgggagttgttgaggtgagtggagattgtagagggtggatattaaattagtgggagatagaatgatttttagtagaattttagtgaataaatgttgttttttggttggttttgtggtggtaggtatatttgtatatagagtgtttgggtgtgtgttgtgtgtattggatgtttgggtgtatttgtgtttagtggtgtaggagtttttattgatttgatttttttattttaggaaaatagaaatgttggtgtttttttggtggttaggttggggttatttatatggttttttttttttgttttttaggagaaaggtagggtgggttggtattgttgttgttggtgggtgtagattttgggattttgattttagtttttatttatttagttttgttggtagagttgggtgtagtggagaaggagggtttttagtgttaaggagttttgttaggttttttttgttttgtatttttgtgggggtgtttgtttgggtaggtttgtagggtggtgggttttttgaggttaggatttttagatttttgtggagtttttgtttggttatggagtagtgtggagtaagtttagtttgggtttggtggggatatagttaggttttgggtgtgggggttgtttagtttgaaggagtaaggattttataaatgagttttttttttttgtatatttagggaattttttttttgtggggtaatagtttggttgggggtttagttgtggggtggtgtttgtagtttgggtttagatttgtggtatgtagagtttgggaggtttgagaggaattagtgggtagaggatttgggaaaggtgtattgatttttttgtaggtttgattttggtttttatggtgaaagtaggtaggtggtatagttgtggttttttatgagggagtagtttagattatatgttgttggattaaaatgtaataaatataggagtaaaaaaaaaaaaaaaaatttagtgttttaagggtttgaggatttatttagttttaaagagaaagaatattttttatgttattgtaagtttagtgtttgtttgaatatttttgaggatggggaatttattattttataaagttgtgttttgtttttttttagtgttatattttgaaaatagatttttaaaaaaatgattgttttatgttattgtatttttattaaaataagagagaggttaatatggtaatagaagttgtgttagtattttttgtttggtttttaatttatgaattttttgaattgtttagaagttggggtttgtggggaatgtgtggttttgtgttattagtgatgattttggggtgtagtttgggtttaggtaatgagaatttgggagtttttgtggtgagattttagttttttttttttagggttttgaaaattttgaggggtagtttttagattgttttttggtagggtagaggtttagtttagaggttttgtttttgtttgggaatgttaatggtttagttgtttggggaaatagaaaatgtttaaaaagttgtttttggtaatagattattagtttttgagttttttttatagggagaagaaaaaaaatttttaagttatgaaagtttggaaaaatagtaatttaatgtgtagattatttgtttaaagattttaaatattttttgatgagtggaatttagaggtgtggttagtataggtgaagttgattttttttttaattttgtttaggaagttgtataaagttttttgttttgggggggaaataataaaaggtaaataaaaatgatattttgaaaaggagagtttttttgttttagtggagtaaaaagtttttgtttttaggggaaagtgttttggtttagtatgggtggtagggttagtgagtatttagttggagggagatttgttgaattttgtaaaatttaaaaaaatgtagttattggaatagtattgtagttttgaatatttttttttggtaataaaatgtgtattttttttggttattttgtgtttatatgtgatatatttaaattgttttatttaaaaaaaaataataattattttttgttataaaggtatttggtatttgtttttaggtggggtgaaggttatgagtatttgagtattggggaggatgtttaggtagtttttttggatttagatatgtttagaaaatttattattttatttgggatttttagtattttataataaagagattttgttttatttaatgtaatttttaagaattttaatatataaaaatgtgggggtgggggtgtttataattttgataagtatagttgtaaatagaaatatttatttattttttataagattataaatatttgatattggaattgtaaaatgtatatgttttataaattaaaataataaagaaaataaaaaatagaaattaattttgttttttgttaaaaaggtatgttattttattgagttttttaagtagtagatggttatttagatttttaaattataatttttgtttttatatttttttttttaaaaaggtttatattattatgtataatgtaaaattattattgtaatgaaataaagaggtttaaggtaaagagtgaagtttatttttagtttttagggagattagtgggatttttagtttagttgtgtgtatatttttgggttagttgtgggtatattttttgggttgttttagttatagatggatagttggattggtttttttttatatatt

SEQ ID NO: 96 - DNA, 2280 bp, Artificial Sequence
  chemically treated genomic DNA (Homo sapiens)
tagtggtgagtatttgttgttggttttttagggtaggtagtattgttgttttaggtgtgtggagttggggagaaaaaaattgaatatgtgtgttatttagggtttttagataagtttttttgtgtgtatatatattttgaattggagtttagaaggttggatttgtgttttggggttgagttttttattttttgtttttagtttggaagattttagtttgtttgaaggtggtgtttgatttgttggtggatttggtgggtgtttgtttttgatatttggggatgaggtgggagtgttttgagtgttgggaagttttgttttgtgagtttttggtagtgatatgtgggagtgttgggtttggtatttttgatgtttttgaggttttgggtggttgttttgtttttttgggggtttttattttttaagtggttttaaatgattgaggatgggttttttgtgttgttgtagttgttattttttttgggaaaggttagtgattttggatgtgtaggttttgaaaattaaggtttagatttatattgagtgtttaaagattgtatttgaattttttttgttggttattgagggagagaaaggaatgtttagttttatttatatttatagaaagaagtgttgagggtgggggaaatgtagttttgttgggtgagttgggataggttttttgtttgttttttggttgttgtttttttttagttgaatggggagtgatttgttttgggtgtggtttttggggttgaagattgaggtgtagttttatttttggtttggtagtggtttggaagagagagggaaaggaggaatatttatttggttaagagatgttgttagagtttttaaagttggtgggggatggaggttggggttttggatttttagagtgtttgtagttgggtttttgggttttttggtgtggggaatttgattttgtagtttttgttagggtgtggtggggttgtaagaagggaggaaggagtgggattagagtttttgagggtgtgggtggtgtgtatttagttttgtttttttgtgtgttttgttgtttgtttgttttttttgttgtattgggtggttttggtttttgtgtttgtttgtttttgatgtttttgtgtggttttgtgttgtttgtggttagttttgttttgttttgtaaggagtgtgttgtttttttaattgaaatgggattaagattttagggtttttttgtttttttgttttgaggtgataggattttagttaatagattgaaaatgtgaaaagtatttgttgttttttgttttaagtgtttttgtggaaggattatttatttggaaaagtagaataaattttgttgttgttttttttttggaggtgtgtttattttagagtttttagatttattggtatttgttatatttttttttgggttttataggtaggattttaagaatgatatgggggtatttgggtgatttgtgggttgtaggtttttaagaggttgtttttttgtgtatggaagtgttgtagttttattttagtggaagtaatattaaattttattttagaggtttgttttgtaaagaatttagagtttattatatttgatattattttaaaataatatttgtttgttttaagaagttgggagaaattgataaaagaaaagttgaaatttatgttttttatttttattttaggagataattttgattaatagtttggtttgttttttatttttattttttaaaaataaataaataaataaataaattaaaatttattatatttttagattgtgtaggattatgtaggattttgtaaaaataaaaatgggattatattttatttgtttttgtaatggtttagtttttattagtaattattttttattagtatagtagaattaattttattttagtattattattattattttgagatagggttttattttgttatttaggttggagtatagtggtatgattttggtttattgtagtttttgttttttgggtttaagttgtttttttgttttattatttggttttttttttttaattagttgggattatagttatgtgttattaagtttggttaatttttgtatatttttgtggagataggttttattatgttgtttaggttgattttaaattattgaatttaagggatttatttattttggttttttaaattgttgggatggtagatttgagttattatattggtaaatttattttttataatggttgtgtggtatagaatttttattttataggtgtg

SEQ ID NO: 97 - DNA, 2280 bp, Artificial Sequence
  chemically treated genomic DNA (Homo sapiens)
tatatttataaaatggaaattttgtattatgtaattattataaagaataaatttgttggtgtggtggtttaggtttgttattttagtaatttgggaggttaaggtgggtggattttttgagtttagtagtttgagattagtttgggtaatatggtgaaatttgtttttataaaaatatataaaaattagttgggtttggtggtgtatgattgtagttttagttagttgaggggaaggggttgggtggtgagatgggaggatagtttgagtttaggaggtagaggttgtaatgagttaagattatgttattgtattttagtttgggtgataaagtgagattttgttttaaaataataatgataatattaaaataaggttaattttattatattgatagggaatgattattagtaggagttaggttgttgtagaaatgagtgaagtataattttatttttatttttataaaattttatgtaattttatataatttaaaagtatagtgggttttggtttgtttgtttgtttgtttgtttttaaggaatgggggtagggagtaaattaaattgttgattaggattattttttagagtagaaatgggaagtatggattttaattttttttttattgattttttttaattttttaaaataagtaagtgttattttaaaatagtgttaaatatagtaaattttggattttttgtaaaataaatttttaagataaggtttgatattgtttttgttaaaataaagttatgatatttttgtgtatgaaaaaatggttttttgaggatttgtaatttatagattatttaggtgtttttatattatttttgaaattttatttgtaaagtttaggaggaagtatagtgaatgttagtgggtttaggagttttggggtgagtatgtttttggaaggaaaatggtaatagaatttattttgtttttttaagtaaatgatttttttatagaggtatttgggataagaggtgatgggtattttttatgtttttgatttattggttaagattttattattttaaaataaggagatgaggaaattttgggattttgattttattttgattgagaaaataatatgttttttgtgaagtgaaatggggttggttgtgggtagtgtggaattatgtgaaggtgttgggggtgggtgggtgtggggattagggttatttggtgtagtaaagggggtaagtaggtggtagggtgtgtggggagataaggttgagtgtatgttgtttgtgtttttgaaggttttagttttatttttttttttttttttgtagttttgttgtgttttggtgaaggttatagggttaggttttttgtattgaggagtttagaagtttggttgtgggtgttttgaagatttgggattttggtttttgttttttgttagttttagggattttggtggtgttttttagttgggtagatgtttttttttttttttttttttttaagttgttgttaggttgggggtgaggttgtattttagtttttagttttgaaggttgtgtttggggtgggttgttttttatttagttaagaggaagtagtggttggggggtaggtgaggaatttgttttggtttatttggtaagattgtgttttttttatttttggtgtttttttttgtgaatgtgaatggaattaagtgttttttttttttttttaatggttggtgaggagaatttaaatgtggtttttgggtgtttggtatgggtttggattttggtttttagagtttgtgtgtttaaggttgttagttttttttgaaggaagtgatagttgtggtggtgtgggaggtttatttttggttgtttaaagttatttaaggaataaaagtttttgagagagtaaaatgattatttgaaattttggaagtgttgggggtgttgggtttaatgtttttatgtgttattgttggggatttgtgaggtgaagttttttagtgtttaaggtgtttttgttttgtttttaggtattaggaatagatatttattaggtttattagtgggttagatgttgtttttgggtaggttgggattttttgaattgggagtggagagtaaggggtttgattttgggatgtgagtttggttttttggattttggtttagggtgtgtgtgtgtgtggaggggtttatttgggggttttgggtagtatatgtgtttggtttttttttttttgattttgtatgtttggagtggtaatattgtttgttttagaaggttagtggtgagtgtttgttatta

SEQ ID NO: 98 - DNA, 3640 bp, Artificial Sequence
  chemically treated genomic DNA (Homo sapiens)
aatttttagaaattaatttgttataattttatgatattgtaatattttttggaagagatatatgtggatgtttttatagtaagattttgtgataagtaatttttatgtttgtattaaaataattagattgttttgtgattggtttagttatttagtttaattttattattttaggaggaaattaaattttgttagtattaatatatttgtattaaaataagaatttatataaatttattgatagaaggtaggaatttatgattgtgtattaaatttatttatataagaaatatttttttttttattggattttatgagattgatattttttatgtagaaataatgtggttttttttttttaaagatgtttatttattttatttaaatagagatataatgagagtattatttaataaatatttgttaaatgttttttttagtattataagaaatgtattttttaataattataattttagtaatattttttttttgttgttattttaggttgggggttatttaattttattaagagtgtggaaattttgttgttttaatggggattgaaaggaaattagttattttttatttaaattattaaggtttttagattgatttaaaatattaagttggtgtttaaatattttaataaatggattttataaagagtataagtaatgttatttgaggaataaggttttaagttgaggagtaggatattggagagttttttttttaattatttatttttattagatttgaggattttttgttttataagaaaattagaaataaattttattggtatgttttgtaagaatgattttttttgataatttggggtagtagtatttgtttgattagttgaatttgttatgaatgtggaaataatgatattaaaatagtttgtgtaataatttttttaaagattttgtagattagagatgattatagattttttttagtgtggattaaagggattgaattgaatgttttagtttaatgatttaatttttgttatatttatagggatgtgaattttgattttataagtaggtgtgtatgtgtatttagatatttatataaagttgtgtggagggatgaaaagattaattatttgattgatgaggataggtttgatttttttgattattttagtgtgttagtgtatatttttggttgggtttagtgttttaagaaattttggaattttagttgttaatttttgtttttttattatgattttttaaagatattttatttgtttattggggtgaagagaaatgggattaggtgttagggtggtgggattttgtttagggttttgattttgtgttagggttttagattagttggtttttgaaggtttttttatttattttatataagaggaaataaagattttttagtttaaggttttagggttgttttttgattttggttagtttgtaggaagaggaaataataaaataaaggaattgttaatttgttgggtattatattttttagttttaatttttgattttggattgttagggttattttttttatgttgattttgttttttttaaatgaaaatatgttaataaaagtatattttggatataaaatttaagtatgtattttttttggggaggttagagttgaggtgtattttggaagatgagaattttgtttttatgaattgggtaatatttaggtattgttaggtattttgatagattttttagatattttttttttttttttttatattttttttttattaaaatagttattgttttgaaatttattagaataatgatgttttaaaaataaaggtgtagtaagtatttttttttttgttgttgtgggttgaattatggatgtttgtgggttgtttagttttgatggtttgtagggggtgtgtgttgtagttgtagtatagtttggttatttttagaaagggagttgaatggagggaagtagggagtgtggagggtttgaggtttgtagataaggagaggtgtattttgggatttgggttttttgttgttataatataattgtgttattgttggtattgtttgatttaagtgttggtggtaagtggtgatgttggggttgggtttttagtaattgttgtgttttgggttaggttggttgttttagttattgggatttttttttggatgtttttagggtgataggtgttgtatttattgatgggatagttgtatatttttgaataggtagtggagtttgtttttggtaggtattttagttgtgttgatattaaggttgttatataatagttattagttttttttaagttttagaagtaggttttttttgttttagttatagtggttttagttgttgttatgagtttattttttatttttaagtgtatttttttttttttatttgggtttatgtttgttatatagagagaattatatagggggaattatggttttatatttttgaggggatagatattggttgtgagataggtattatgtagagttttttggtgattgtttgtaggagtgagattttttttggttttgtagttggttaggtgtgtgtgtgtgagggtttttagttgattattgggatgtattgttattttttggtttggtgggttttgggattttttggtttttgtaggaggttattttaggtttttggaggaggtgtttttagttggtggtgttttttgttttgggtttagaggtggatatggttggttgtgttttgttggttttttgtttgtgttgtagtgggttgggagtagttgtgtgatattagatttatagtgttaagatgtgaagtgtgaggaaattgttgtgtttgatttttttttttttaatttttggatttaggaatgtttttagtttttgtgttttatatgtttagttttggttttttttttggtttagaagtttttaaggattgaagggttttgtttagggttttgtatttttgtttgatttttatggtttagaaaagtagggggatatttgaaatgttattttgggataaatattaataaaaaagtaaatggatttgtgtaggggttagttattaattaattaggttgtaaggttatttagggtaaatatagtttaggttgggttgggtgagatttttttatggttgttttttgattgaatttttttttttttggtttaggttttttttaggttgttttggggtaaatattggatgggaagggggtgttgttaatttttttgtggggtttggaggtttttttgtttttaagttttgtagggtagggttggagtgtttaatatttatttttgtttgaattttgggtttgtgtgttgtttttttttgggtttgtggtgttgtgtttgttgttgggtgtgtgttgttgtttttttttgagttggtagtttttgttgtgtggttgaagttttttggaatttttaattggaaattaattttggttttgatagatgtttatgttagaggtgtgttatttatttatattttttgttttattttggaggagatgtggtgagaattttgttgttttgttttttaatggggtagtagtaagtagtatatggagggaatatatattgatttttaaaaggtagttaatttggtgggaatttttttttgttgtttt

SEQ ID NO: 99 - DNA, 3640 bp, Artificial Sequence
  chemically treated genomic DNA (Homo sapiens)
agggtgataggaggaaatttttattaaattaattattttttaaaaattaatatatgttttttttatgtattatttgttgttgttttattaaagagtagagtgatagggtttttgttgtgttttttttgggatgaggtggggggtgtgggtgggtggtgtgtttttgatgtgggtgtttattaagattaagattagtttttaattaaagattttagagggttttggttatatagtaggagttgttggtttggaaagagatagtgatatatatttaatagtaagtgtagtattgtggatttaggggaaggtggtgtgtaggtttgaggtttgggtgggggtgggtgttgggtattttgattttgttttgtgggatttggaggtgaggaaatttttaaattttgtgggggagttggtggtgttttttttttgtttggtgtttgttttagaatgatttaagaaggatttgagttaaggggggaggggtttggttggggggtggttatgagaaagttttgtttagtttaatttgggttgtgtttgttttgagtggttttgtggtttggttgattgataattggtttttgtataagtttatttgtttttttgttaatatttattttggggtgatattttaaatgtttttttgtttttttgggttatgggagttaggtaggagtgtggggttttaggtagagttttttaatttttgaagatttttgggttgggagagaagttaggattgggtgtgtgggatgtaggagttggaagtgtttttgggtttaagagttgggggagaaggagttaagtgtagtggtttttttgtgttttgtgttttggtgttgtgggtttggtgttgtgtagttgtttttagtttgttgtggtgtgaataaagggttagtagggtgtgattgattgtgtttgtttttgagtttggggtgaggggtgttgttagttgggagtgttttttttgaaggtttaggatggttttttatggagattaaggagttttagagtttgttaggttgaaaagtggtagtgtattttggtagttaattggggatttttatatatatatatttagttgattgtaaaattaaaaaaggttttgtttttgtggatagttattagaaggttttgtgtggtgtttgttttatggttggtgtttgtttttttgagggtgtaggattatagttttttttgtgtagttttttttgtgtaatgggtataaatttgggtgaggagagggaggtgtgtttggggataagaagtgggtttgtggtgatgattggaattgttatggttggggtaggggaaatttatttttggggtttaaggggggttgatggttattgtgtggtgattttggtgttagtgtagttaggatgtttgttagagatgaattttattatttgtttggaggtatgtggttattttgttaatgggtgtagtatttattgttttggaagtatttggagagggattttggtagttggggtgattagtttgatttagggtatagtggttgttagagatttagttttgatattgttgtttattattgatatttgggttggatagtgttaataatagtatggttgtgttgtagtagtagaggatttaaattttaggatgtgtttttttttatttgtaagttttgagttttttgtgttttttgtttttttttatttggttttttttttgggggtagttgggttgtgttgtggttgtggtgtgtgttttttgtgggttgttggggttgggtgatttgtgagtgtttgtggtttagtttgtggtagtgaagaaagggatgtttgttgtgtttttgtttttagaatgttgttgttttagtgaattttaaaataataattattttgataggaagaaagtgtgaaggaggaagagaaggatatttagagggtttgttggggtatttaataatgtttgggtgttatttaatttatgaaaataaaatttttattttttgaagtatattttagttttaatttttttaaaaaagatgtgtatttggattttgtatttgaagtatgtttttgttggtgtgtttttatttaagaaaagtggggttagtgtagagaaggtgattttggtggtttgaagttggaggttggagttgagggatataatatttggtggattggtggtttttttgttttgttgttttttttttttgtaaattgattggagttaggaggtagttttgaggttttgagttgagaagtttttgtttttttttgtgtggggtgggtgaaagggtttttggaggttgattggtttggagttttggtgtggagttaggattttggatagggttttattgttttgatgtttggttttatttttttttgttttggtaggtagatagaatgtttttgggaagttatagtaagaaaataaaaattaatagttaaagttttgaagttttttagggtgttaggtttagttgggaatatatattggtatattgaggtaattgaaaagattaaatttatttttgttgattgggtggttgatttttttgtttttttatgtggttttgtgtgagtatttgagtgtatgtgtatatttgtttataaaattggaatttgtgtttttgtgggtgtgataggggttggattattaagttaaaatgtttaatttagtttttttgatttgtgttggggaaaatttatagttatttttaatttatgaggtttttaaggaggttgttatatgagttgttttgatgttattatttttatatttatggtaaatttagttaattaaataaatgttgttattttaagttattagaagaaattgtttttatagagtatattaataaaatttatttttgatttttttgtaagatagaaaatttttaagtttaataaaggtgggtaattaagaaggaggttttttaatattttgttttttagtttgaggttttgttttttaagtgatattgtttgtgttttttgtaaagtttatttattggaatatttaaatattgatttaatattttaaattaatttaggagttttgatggtttgaatgagaaatgattagtttttttttagtttttattaaaatagtagaatttttatatttttggtaaaattgaatggtttttaatttagggtagtaatagaaggaaggtgttattgaagttgtggttgttagagggtgtattttttataatgttggagaaaatatttaataaatatttattaaataatatttttattgtgtttttatttgaataagatggataagtatttttgggagaagaaagttatattatttttatataaaaaatgttagttttatagagtttagtaaaaagaaaaatattttttatgtgaatggatttagtgtataattataaatttttattttttattaataggtttgtataggtttttattttaatataagtatgttaatattaatgaagtttaatttttttttgagataataagattgggttaggtgattagattaattataagataatttgattattttgatataaatataaaaattatttattatagggttttgttatagaagtatttatatatgttttttttaagagatgttatggtattataaaattgtaataaattaatttttagaaatt

SEQ ID NO: 100 - DNA, 3240 bp, Artificial Sequence
  chemically treated genomic DNA (Homo sapiens)
gaaattgaggtataaggtagtaatgattattgagggttttgtttttgtttttttaggtgaggagtttattttaggggttttagtttgaaagtttagaggtgaggggtgtgtattataatttttagaggtttttggatttaagggtggtttttgttttttgttttttttgtgtgatgaagttgggtttattaatgggagtttggagtggggtgagtaggggtgggatggggtgggattgtggggaggtggttggtgggttgtgttgtgagttagtattttagagagtgtggggtttggatagttgtgtgttgagggttttggggtgggtgttgtgggatttttttgggttatgggtaagtggttttgtggtgtggtttggataggggtttggtggttttgtagggaggtttaaggtgttggtgttgggttttttttagtttttgtggtagttggtgtgttgtgtggggtggagaggggtttggggtgggttttggggtgtgggttaaggggagtgagtttggtttgtggttttagtgttttttggttggtgtggaaggggtgaggttgggtgtttgtgtgagttttgagaaaaggaaagataaaaagttttggtggttaggggttttttgggtgtttattttgaaattttttttgttgttttttgtttgaaatatgttgagtttggtatggttttgttgttttattttttgttgtggtttttattttgagttgggtttagttaatttgttgtgatagttgttggtagttgtttttttgttttgtgatattttgtaggttttagaattgtggtgttgttgggtatagattttgggtttagagtgtgtggtttttttttttgtggttgttgttttttgaaaggggttgtgtgggtgtgaagaatttgtttaatgtgttttgtaggatttattgttttttttttggttgtgggttgtgttgatggtttggggagtttggttttttgttttttgtttttttttttttttttttttttttttttttttttttgtttttttgtttatttgttgtagttttataggagaggggttgtttttttggttgttttttttttttgttttttgtgtgtttttttgtttttttttggtttgtagaagggatggggtggtggttggggagtgttaggggaagagggtaagagtgtgggttatgagtttgtaggtgatgtttggttttgtgtttggtgggagttgtgggttaatttgggtttgtgttttgtttttttgtggtgtttaggggttgtttgggttggggttgtgttattttttgtttagtgttggtgtggtggggtttgtgtggtgtaggatttttgagggtttagggggttttaaggtgttgtgggtttagtgtttttttgtttgtagagttttgggttagtaaggagtgttttgtgggttttaggggaggataataggtgttttttgttttatttgggtttttttggtgggagtttatatgtatggtggtgttattgtgtttataggtaatgttagagtataggaggggtgggaggttggggtttgagggttttattttgtagtagagtttagagtttaatttaggttttagggatttgtttggggtttagaatttggtgtggtagaggtagaaagggtttttgataatttgtttttatagttgagagatgttaattggtatttttgagtttttgttttgtaggtgaaatgggaatatatgaaattatttgaggagtttttattgtttgttattattaaatgtggtttagattttgtggggagggatagttttattttggaattggggtttttaggatattttagagtttggtaagagggatagggagaatggggtttggaagttggtagttttatatttagtgttttttgtatttttttttttttttgtattttttggtggtttttgtggttttagttgtttttagattttgttttttttgtttttttttaagttgaggtattgaggttgggttgtggtttgagttgtatttgtgttttgttagggagtgggggttttaggtttattgtgtttttttttattgttggttttagtttaatatttggtaggtttttttttttaaattgttggagtaagtttgtgtagatttggtttggttgttgtttttgggttgttgagtggattggttgttttgttgttttaaaggttgtttttgttttgttttagtttaagtttagagaaatttaagttaataattttagttgagggggtggggtggtgtttgttggttgttattgaggttgttgttattattattgtggtaattgatgtagtgtttttagttggtgattttttatgaaaggaagtgttattttttttttattatatttagggtgagtggggtgggtagtagaaagatggggagggagagaaggaaaggggtgtgtgtttttagtagatttttaaatttgagagttgtgtggttttgtattagttattgtttttttttgggtaataggggtttgtaagtttattgtgtttattttgtatttaggaggttgatgtttttggagtatttgttgggtagtgaggtgttttggggagggagtaggataggtaggtttttgatttttttattgagtttggttgtggtttgtgggggaagttttttttttttttttatttttttttgttgagaatattgggtatattgagtttagtatgtttattttgtagatggggaaagggagatatagaattagtgattaatttggtaagaggtgtagttatgtagtgttggaattttttgttttatttgtttttttggtttatttttatttgtttttagtttgatgtttggtagggtaggggtttattgatttttttgtatttatttattgtttggttttatagttattttttagttttggttaagttttgtgagatattttaagtttgtttttagtgatttttaattattgtttgattgtttttatttttttgtttttgtatatttgtttttgttttgttaggttggttgggttttggttagagttggttttttatttttttaggtaataggtagtagttttttaaatggaattttagtaggtattaataggttttttttttttttttaagattatggagataatattttttatttaaagatggtgggttttttgggttttttttgatttaggttagggaagttgatttatagagtgtgggggttatgtttttttt

SEQ ID NO: 101 - DNA, 3240 bp, Artificial Sequence
  chemically treated genomic DNA (Homo sapiens)
ggaaggggtatggtttttatattttatgaattaatttttttggtttgggttggggagggtttagaggatttattatttttgaataaggggtgttatttttataattttgaggaaggaggaaagatttgttgatatttattgagattttatttaaaaaattgttatttgttatttgagagagtagggggttagttttggttagggtttaattaatttggtgaagtaaaggtaggtatgtaaaggtaggaaggtgaaggtagttgggtggtggttgagagttattgaagataaatttaagatgttttatggggtttagttaggattagaaggtagttatggggttaggtagtgggtggatgtggggaagttagtgggtttttgttttgttagatattaagttggaagtagatgaaagtgggttaagaggatagatggggtaaggggttttagtattgtatggttgtattttttattaagttggttattggttttgtatttttttttttttatttataagatgggtgtgttagatttaatgtgtttaatgtttttagtagaaaaaagtgagaagagaaaggaggttttttttataaattatagttaggtttagtgagaagattagaggtttgtttgttttgttttttttttaaggtattttgttgtttagtaggtgttttggaaatattagttttttgggtgtaggatgagtgtaatggatttatagatttttgttgtttagagaggggtagtgattagtataaggttatatagtttttaagtttaagggtttgttggaggtatatatttttttttttttttttttttttatttttttgttgtttgttttatttattttgggtgtgatgggaaggaagtgatatttttttttatgaaaagttattgattgggaatattgtgttaattattataataatggtaatagtagttttaataataattagtagatgttgttttgtttttttggttgaggttgttggtttaagtttttttaagtttgagttggagtaaaataaagatagtttttgaagtggtgaaatggttggtttatttggtagtttgggagtggtggttaggttgagtttatgtgagtttgttttagtagtttggggaggggggtttgttaagtgttgagttggagttagtagtgagaagaaatgtgatgggtttgggatttttattttttaatagggtataggtgtagtttaagttatagtttaattttagtattttagtttgggggagggtgagagagatagggtttgggggtagttgaggttataagagttattagagggtatagaaagggaaggaggtgtgggggatattgaatgtgaggttattaatttttaagttttattttttttgttttttttattgggttttgggatgttttaaaagttttagttttaggatgggattgtttttttttatggagtttgggttatatttggtggtgatggatagtgagagttttttagatggttttgtgtgtttttattttatttatggggtagaggtttagaggtgttagttgatgttttttaattgtagaagtagattattggaggttttttttatttttgttatattaagttttaggttttaggtgggtttttaaggtttggattgggttttgagttttgttgtggggtgaagtttttgagttttgattttttattttttttgtgttttagtgttgtttgtaggtgtagtgatgttattgtgtgtgtgggtttttattagaggagtttgggtggggtaagaggtatttgttgtttttttttggggtttgtggagtattttttattggtttaagattttgtaaataaagggatattggatttgtagtgttttgggattttttgggtttttgggggttttgtattgtgtaagttttattatgttggtgttgggtggagggtgatgtgattttagtttgggtgatttttagatattgtggagggatggagtgtgggtttgggttggtttgtagtttttgttgagtgtgaagttgggtattgtttgtaagtttgtagtttatgtttttgttttttttttttgatgttttttagttgttattttgttttttttgtagattgagggaagataaggggatatataagggataggagaggagagtaattagggaagtgattttttttttgtggggttgtggtgggtgggtggagagataggagaggaaaagagaaaagggaagagaaggaaggggtagggggtgagaagttgggttttttggattattggtgtagtttgtggttgaaagaggaatagtggattttataaagtgtattgagtaagttttttatatttgtgtagttttttttaggaaatggtggttgtagaggaaagggttgtgtgttttggatttggagtttgtgtttggtggtgttgtggttttgaaatttgtgggatgttatggggtggaggggtggttgttgatagttgttataataaattagttgagtttagtttgaggtggaaattgtagtaggaagtgggatgatagagttgtattgggtttggtatattttaggtaagagatggtgaaaagagttttgagataaatgtttgggaagtttttggttgttaaaattttttgttttttttttttttgaagtttgtgtggatgtttagttttattttttttgtgttggttggggagtgttgaagttgtgggttgggtttgttttttttggtttgtgttttgaaatttattttgggtttttttttgttttatatagtgtattgattgttatgagggttggaggggatttggtgttggtattttgaatttttttgtagggttgttgagtttttgtttgggttgtgttgtagagttgtttatttatggtttggagaggttttgtggtgtttgttttgagatttttagtgtgtggttgtttggattttgtgttttttgagatattggtttgtggtgtggtttgttggttatttttttgtagttttgttttgttttgtttttgtttgttttattttgggtttttattggtaagtttggttttgttgtgtggagaaggtggggggtggggattgtttttgagtttggggatttttgggaattgtagtgtgtgttttttgtttttaggtttttagattggagtttttggaataggttttttatttagaggagtggaggtaggatttttagtaattattgttgttttgtgttttagtttt

SEQ ID NO: 102 - DNA, 2155 bp, Artificial Sequence
  chemically treated genomic DNA (Homo sapiens)
tttttttttttttttatttttggagggttttagttattagttttgaagttgtagtgagagttatttattgttttggtttttgggattttttgagtaggagaaaaaaattagaaaattaaaagagagagagagatttggaaggaagaagtaatggaggagggagatagggggaatgagaggggagtttatattatagagagagaattttttaaaggaagtgtaggtgtttatgggataggagtgtggaagaaaagagtagaaaaggaaaagtagttttaagtaagagaaagtaaggagaggtggatagggaggggaagagttaagagaagttaagttgagggatttgtagtaattttgagaaataaaagtgaattgtttgtgggtggttgttgtgattttagtaaaaagtggagtttaaggtttagggattttgttgtttatattgtgttttgttttattttggatgtttttaattttagttttaggtatagtatatgagtaggggtagtaaggtttggttagggttggtgttgtatgggagttgtgggtttttgtaatatttaggtgtgtaggtgttataagaaggagttggggttgttgtttttgtagtgtggattttgttttgtgttgtatatgttttagaagagtgtgtttggaagtgttttttttggttttttttgttttttaagatttgtttgtaatgtttatatttgttattattgtataagtattagggtgaggaggtttttttgtaggaattaatattgattttagttttttgtttttttaaagtttttttttgatgatggtgagatttatattttaagttagaagaaaataaaattttgtttattttgggtttatgattgtataaaatttaaaatgttgttggtatgaagatgtagttggaagattttagaaatttagtattaggaggtagagattttatagtgtttagagatgagtttttaaataaattaagaattatgtagtgggaaattaaggaggagggtttgaggggttgattttagagggatagatagagaaattgagagtgaaatatttaaggaagtggaataaattgttgtagttaggtgtttttgtttttttggaaatttgaaatttgtttaaattttattttaggtgtttatggtattagttgtagggttttgtattataggggttgttattttttgtttttggagtttttatgttgagatttattatttgttggtttttttttttttttttttttttgtttttttattttttaaatataagataaaaatatattttatttattattatagatatatatattttatttttattatataaatataaaatatttaaatatttaaaatatttagaataaagttagtagtttggatttagtgatatttatttgtgtttgaattgtttattattttttttattatttgtttagaaaaaaaaaaaagatgaaaaagagggggagagtttttgatgtaaataatttataataaaattattattttaaaaaagtgttttttgtttgttttagatggatgaatatattttagatattgtggtattttgtagtttgggtttgtgattttggttaaaatgtgggtggttgtggttgtagggatgattgttgttgtgtagggtaaggaaagagggtgttgtggtttgtgttttgatttgggattattgaaattttaagattggggaggtgaggggagtgttttttttattaattatataagatgttatttggattttgagattattgttagaggaggtttgattatttagtggtgtttttgtttttttttttgtaaagaattgtttagaaatttagatgttttttgtgtgtaggaagggttttgtgaatttgggtgtttgggagaggaggtaatgagtgttgatttgttttttaaattgagtaattgtgtttgaagttatgtgtttgggaggttgtagggtgaagtgttggttgtgtaggttattgttggtagttgttttgtttttttttggaggagtgggaagttgttggttattgttttgaataggtttggagaaaagattttgaattttttttgattagtggtgttatttttttttttgttttttttttattaaatttttgtttaaagttataatatttagaatt

SEQ ID NO: 103 - DNA, 2155 bp, Artificial Sequence
  chemically treated genomic DNA (Homo sapiens)
ggttttgggtgttgtaattttaaataggaatttaatgggggaaaagtaaaggaaaaggtaatgttgttaattaaaggaaatttagaattttttttttgagtttgtttggggtggtggttgatagttttttatttttttaggaaagagtaaagtggttgttggtggtagtttgtgtagttggtgttttattttatggttttttaggtgtgtagttttgggtataattgtttggtttggaaaatgagttagtatttattgtttttttttttaaatatttggatttataaaattttttttgtatgtaggaaatgtttggatttttgagtagttttttgtggaaggggaggtagggatgttgttgggtggttgggttttttttagtagtagttttggagtttagatagtgttttgtgtgattgataggaaagatattttttttgtttttttagttttagggttttagtggttttaaattagaatatgaattgtgatattttttttttttattttgtgtagtggtgattgtttttatagttatggttatttatattttaattaaaattatagatttagattgtgaggtgttgtagtgtttagaatgtatttatttatttgaagtaagtgaaaaatatttttttaaaatagtaattttattgtaaattatttatgttggaaatttttttttttttttttattttttttttttttttaggtaaatagtgaagaaaataatgaatgatttaaatgtgggtaggtgttattgaatttaggttattaattttgttttgaatgttttggatatttggatgttttgtatttatgtggtgagagtgaaatatatatatttatgatgataaatgaggtgtatttttgttttatatttgaaggataaaaaaataaaagaagaaaaggaagaaagagttagtaaatgatgagttttggtgtggggattttgggggtagagggtggtagtttttatagtgtggggttttgtgattggtattgtgagtgtttgggatgaggtttgggtggattttgggtttttggagaggtagagatgtttggttatgatgatttgttttatttttttgagtgttttgtttttgatttttttatttgtttttttgaggttggttttttagatttttttttttaattttttattgtgtaatttttagtttatttaggaatttatttttgggtattataaagtttttgttttttaatgttaggtttttagagttttttagttgtatttttatgttggtagtattttggattttgtgtaattatgggtttagaataggtaaggttttatttttttttgatttagaatataagttttgttattgttaaagagaaattttgaaggagtaggagattgaaattgatattaatttttgtaaagagatttttttattttggtgtttatgtggtggtgatgggtgtagatgttgtaaataaattttgggaagtgaggagggttggggaggatatttttggatatgtttttttaaagtgtgtgtagtatggggtgaagtttgtgttgtgggggtagtggttttggtttttttttgtagtgtttgtatatttgggtgttgtagggatttgtagtttttgtgtggtattggttttagttaggttttattgtttttatttgtgtattgtgtttgaagttgaagttggaggtatttaaaataaggtggggtatagtgtgggtggtggagtttttgagttttgagttttgttttttgttgagattatagtagttgtttatagatagtttatttttattttttaaagttgttgtagattttttagtttggttttttttggttttttttttttttgtttgtttttttttatttttttttgtttgaaattgtttttttttttttattttttttttttgtgtttttgttttgtaaatgtttgtgttttttttaaggagttttttttttgtggtgtgggttttttttttgttttttttgttttttttttttattattttttttttttaggttttttttttttttttggttttttggttttttttttttgtttaaggggttttaaaggttaaggtagtgggtggtttttgttgtagttttaaggttggtggttgggattttttaggggtgagaaggaagggaga

SEQ ID NO: 104 - DNA, 28 bp, Artificial Sequence
  chemically treated genomic DNA (Homo sapiens)
tatcgcggagattttcgagttttcgttg

SEQ ID NO: 105 - DNA, 19 bp, Artificial Sequence
  chemically treated genomic DNA (Homo sapiens)
ggggttgtttttcgggatt

SEQ ID NO: 106 - DNA, 24 bp, Artificial Sequence
  chemically treated genomic DNA (Homo sapiens)
gataaccctaaaacgcaactcgaa

SEQ ID NO: 107 - DNA, 20 bp, Artificial Sequence
  chemically treated genomic DNA (Homo sapiens)
cgtttcgtaaggagcgtgtt

SEQ ID NO: 108 - DNA, 24 bp, Artificial Sequence
  chemically treated genomic DNA (Homo sapiens)
cgcgttgttcgcggttagtttcgt

SEQ ID NO: 109 - DNA, 16 bp, Artificial Sequence
  chemically treated genomic DNA (Homo sapiens)
cgacgttttcgcgtgg

SEQ ID NO: 110 - DNA, 29 bp, Artificial Sequence
  chemically treated genomic DNA (Homo sapiens)
gttttgaaatttattagaataacgacgtt

SEQ ID NO: 111 - DNA, 31 bp, Artificial Sequence
  chemically treated genomic DNA (Homo sapiens)
ctttctaaaaataaccgaactatactacgac

SEQ ID NO: 112 - DNA, 21 bp, Artificial Sequence
  chemically treated genomic DNA (Homo sapiens)
tacggacgttcgcgggtcgtt

SEQ ID NO: 113 - DNA, 24 bp, Artificial Sequence
  chemically treated genomic DNA (Homo sapiens)
agtaagttcgcgtagattcggttt

SEQ ID NO: 114 - DNA, 21 bp, Artificial Sequence
  chemically treated genomic DNA (Homo sapiens)
taaaacgacgaaacgaccgat

SEQ ID NO: 115 - DNA, 24 bp, Artificial Sequence
  chemically treated genomic DNA (Homo sapiens)
tcgtcgttttcgggttgtcgagtg

SEQ ID NO: 116 - DNA, 24 bp, Artificial Sequence
  chemically treated genomic DNA (Homo sapiens)
aaggaagtggaataaatcgtcgta

SEQ ID NO: 117 - DNA, 33 bp, Artificial Sequence
  chemically treated genomic DNA (Homo sapiens)
aggcgtttttgttttttcggaaattcgaaattc

SEQ ID NO: 118 - DNA, 25 bp, Artificial Sequence
  chemically treated genomic DNA (Homo sapiens)
ctacgactaataccgtaaacgccta

SEQ ID NO: 119 - DNA, 9739 bp, Homo Sapiens
acggaagcatagaaatgtattcaataaatatgcaacagaaggacaatcaatctaatatcaaagtgactagagagttaatgccagggctccatgggtatgctgacattccagaatagagaggactgaaggtcagagactctgggtaacctgcacattaagaacgtcctcaagttatcggggggaaagatagagtcctttctgttctacacaaaggggcagatctaaaatcacagtccctcaaaatctctaaaaatttttgcaagatttgaagagagctttgttccaaactccagtgcacacaatataaacacacattatcaatacttacaataagagattggaattaaagtgcacaccacctcccaaagtttttcaaaactgcttctaatcacaaaaaggtaaattaaaaatcctctctatgttacagtagtttaaaaggtaaataatggaagtagaaaggagatgtacatttgttgaaacctgttatgtaccaggcaccttacataacttatttttatttgatcctcacaataattggcaaggtgtgtgctgcaggacactaagaggtcatagattttaggaggctaagaaatgacctaaaactttacatctaatagttggtatagcaaagatttgaagtcaagaatatctgcctctaaaaattagccgtatactatgacaacacatcccaaataaagatgtataaaaagtacttggctcttcatagatattatataaaatatgggacaatattagtgatatacctaaatttagacattagaaagaagtccttcttaatttactctgtaattgtaactcagttgttcatcttacaggtccctatagtaataattaaacattcctttctttgttttatatgtgttttcaaactgctattaaagatccttggtcagcagcctttatatcttttggcgttttgctgctaatgctcggtaaacatgggcagccaaggaaaatgcagatggtgctatggaacacaaaccacgacaacatatggtatacatttagtcctaacaaagtgcgcttcttaacctctgggtgtcgcttcaccattcctttataagactactcatttccagggaaggtttagtttccaaaaccagggcaacaggcccacatgtgttatatggccattcagatgcacagattatgtgtcctaatacctttaagcaagtgcatttagcacatgcttcctagcactatcatgtgtatttatgaactgttttgcccagatggtaagctcctcgaggacaagtgccatgcctgaaatctcaccttattaactgtgcatggcagagtaacaatgttatctatcttgcatatagagacacacaacctataaattgctcttctaggtaaacctcctaactacactgctacattgtgacaattgtcacatcttctagatgaggctcacacaggctaagcaattagccagaatcacaaactaacaggcaatgttttcttcttgcccacaagagaaagcttttcttgtcttgcaacactttattgtttttttcttttaaggtttttattacaaaggtcaatgtctattggccttttaataaaagtaattattatttagtacttagtatacatatgcaaggcattgttctaagggttttacaaatattaactcatttaatcctcctaaccattccatgagatagacactatttttatccacattttacagataaggaaactgagggacagagagattaacttgtccaaaatcagaggactggtaaacagtagcagtgaaatttgaatccagcagtgaagcatagctccacagtgtgtgctcttaaacatacactattctgcttgaataagagtctacaaagatccttactcaggacatatgaggagttgttcagcaagaaaagaagcatgtttactcctccctatttgatgtatttgattatattctaaaacctttcctcatgccaatagaactccgcgtattatactaaactttcctgcaccgaaggcatatgtaatggttaccttgactgacatgtaaaatacccaaaacaaaataccccgagactcgaggattttttgtttcatgaattagacaccaaaaaaaaaattgtctaggcatcagaagtgttatacactcacatctgtaagtctttcttgggattttcagatttcttatacaagatttttttttgtctgaaatatttcagtgctcactcaatgcctgagcttgaaaattatctaatcctttttaattttttcattttcagctactttgccttcaggcatagggcagggcaagcacttgctttcaatatgatgtttaacactttttatgtttttattttcgtcatcttgaaaacatgctagtaaacatccaaacatactgtaaagatttaaaatttggggtgtgtatacgtatatcaacaggagttatgaattatgtatattgcaggcctatataaattagattttgaagaacaagcatcacagtaatcaagcgggtcataataagacattccatgtgaaatgtaaaaactaccttgaataaattatctgtaagttaacattctcattagaatgacatatttattatttctgggtttgtgatattgctttaatgtattttggctaactgttttaatggcatattaagaaaccatttcaggccttttttccccgttggaatttgcagacttttatttccgtttgaactaaaataatataatattaaaaacaatcccccacttcccaatgtacaataccattttcttctgcccagaaatatttaattaaagcaggatataacctcagtaattatttttacacagaatgactcttaaattaatagtcagttgtatgactaaaaattgggagactgacaatcaaaacaatcttaaatgctttgtttatgtgatgaaaatgagtgatcctttaattccctcacacacattaaactgatttcacagattttctgtactggtgtttaacatagtcaagtgcttgaggttatgtaaaataaacaatcttgagatcttattgcaaatgtttgcaatttatgatgtaaactgatttgtgaagaaaaaacaggatcctatgtcgctgaagccaaagaggcatttttcagaaatcaaaatagttccgaaatttgagcattgcattatactaaagtattaccatctgaggacccaaaaaagttataaatctggggaaaaactcaaaatagatgtacatcagttcagctccaagcaaaggcaccgatcttactatcttactgtgtctcttgtatcatagggtccttaacactaatgatgtcttaaacaatctcttttaactcagtttttcccagtcattgattttgcaactcgggaaggttttgcatgcccaaaagatttggggagcagaggatgggggtgtcctttattaattatattaggattattgagtttcgacccaaactacaagcatgttgggccttatttaaatttaaagtgaattcctcagaccccttcttgggatggttcggggaactacgagtttggaactcttgttcacacaccgaggcgcctgccccagagtttggacactggcattccgggagagcaggccttgcgggagtctggacccgaagggcgagactccacagggccaaggaaagcggcctctgtcctccgttagtcttgggggagcagacgcaagaggaggcaagggcgccgcgagctccccggatgcactggtcccacaggccgtgcccgagtggagcactgcgaatggggccaagaaattttggcctttctcgccggacctggctgcctccgcgggcctctccgcctaccgcgctcccgccgcggcccgactcccgcgggtctccgcgccgaacccacctggctcctatcgcacgggacattcccgacccacccacgccgcgtcactgagcctctgtaccgatacccggcgcctccgccagcagggcctggacgcaccgcctcctttgacctcgggcttcccccgcgctccgctgcttggggcagactggccccgagagggagccaccatctcccctgctccagggtctccagggtccgaacccgtgttgggatctgggttaggattagggtttggagcttggagcctgcctgttaggacccccggccccggcgccgactggagctcgctggaggccacaggaccacggcggatggcctggctgcttcagggcgtaccatgcccgcaggcagatgtttattattaaaaactaccgacgttcatcaaccaggagacccgcaaggcctgcgcactgaatacggcccaaatcctgttcagtggtctttgaaagttaaaagaaagaaacctatcgcccacgtctatgctgaggaacagctttgaatacgagctaagacctgggagagggccaagtgggggtggtggggaacactgctggaggatgtggggctttggcaggggttttacgcaccctccagcacgagggtggggggtcccaggggacgctcaggactctttcagtctttgcggaaggtcccgtcatcacaagagcccgcgcgggaaggaaagttcctgccttggacatggtcagggccgagtcttcaaagtctccaactatccccacacaggcagcacctttgggctttactagtgggatttcttccagaagggggccacgacatggggagagagagctcctcattattttcaaggccaggcttttcctaaacccgattctggcttccaccttctaaatttaaccaatgaagaagctgcttcagccaaccctaaacaggagtgtcagatggggaatcctccctccacagtgccctggcctgcccgcctttgcggctcttttcccgctccgaagtcagcacctgccccgctccagagagggtcaacgaactgggactgattgtcgattatgccataccaaacccaggttgatttcgctccgcaggatccctccttccttcctcccaaaagtgtccccagataaagactggaattatagcaaaacgaataacgagagtccatcttggggaaggaagttactctatcctatgttattttacttcttatctgttctttcattaatttggtataaccctgtttctatgctgggtggataaaatggagggggccggcggaaatgcgctcagcgctaacgacagccacagagccacccttcttactgccccttgactgcggcacgtaagagcagaggcaagcgcttttccaagttggtatattcgagagagtgatacgcattaatcaaaagggaaagactatcccggatattttaatagtaacaggaacaaagatgactcgaaccccatcaaatgaaacgatattttcattcaattgatcgcaaagtgtcttcaattaataacttggcacttatttaaaaggtttaacagaattggaggcgacacattttgtactgacaacacgtcatgagataacatcttttgtttaaaataacttaatacactagaaaaaaatatgtcaaatataaataattttgttttcatggagaacaaatagttacaaagctcaaccgcataccaaagttcagttagaagagcttttcctctttcttgtaaattagaaggtaaaacaaaaacaaaaacaaaaccccacaaacttaggcttgctagcgaattgggatacagactggcttagtccaaggtatcccagtttaaatagctacatgaattgaaacaaacaaccaaaagaaaaaaaaaaacaaaaaagaaacaaacaaacaaaaaaaaaaggttacttgaatagatacacctttgtgagataaaatgcaaatgttgaaagtcagtccacacattatagtcaaaataaactttgttcgtgtgtatcaacatatcttacacaaacctagtgcctgtatctagctgggtgttatttaaggtgaatttgacgggatagagagggggaaataaaccactgtcttcaaataggacttcaggaaaccaacaagaaggaacacaagaaaaggggaatggtgggaactaatactgattgagcgcctactgtgtctggcacagcgaggcgctgtaccttcattatttcatttggtggtcttgttttctttttcctttccccacatattctgcccacctctgtcttcttaggacaatgagtgtaattttttccctttctgacttttttcttttgttccccaggatcaaagacagggcaaatatatatatatatatatatatatatatatatatatatatatggcaaatatatgatatatatatatggatatatatatatcaatttccagatacttttggtattgtttttcatagtgaagatgaaaatggagtgagtgcatgggagataagggggtgggaggagacacaccatcaatggaatacaagtaacatgcaaaccggaatttactgtcagcagtccagacagttttgccataataatttctcagagaaatcattgtctgtggcatttttttgtgttaatattatttttctctctcctcgttttaatattttctcttttcttgctcttccatacatggtgggtttaaactcaaagcatctgattcaacgtaaaaggaggcccgcctctctcatcaaatttctcgtgttaacgtgaacttcgcagaaaaaggtcagtttcaaaacctgtgaacttcccagctgcgcacttttttcatcttagttttttaaataagtatacctcttctttctgctttgccttcttagcgcatttttaaaaacacacatttaagttggtaactccccccagtctctcgagaatcgtctgggttgtttttccatatttttaaatgtataaaatactttaattttaaaatttgtttttgctccttggttctccaatttcagcttctgccaaatagcagttaagaaataagttcccttcctctttttctctcccgtttgtctttcgatttttttgtttgctcattttttcattgttaacaagatttttttttctatgcaagagtccatcgttgcagctttgcggtgagccaaactccgcggttccagcactcccctgtccagtctctctccagactcccccaaacccgctcctacaaaacccaattctaggccctcgagtaggaaaacgggcaggagccacggagcctgcgtgcctcgtgagatccctggtcctgcgtggagtctggctttccgagtccaagatgcgataggggacgagggatggtcagtgaggcgggaagagggccggctcccgaggtctcaaaggggtaacggagaagcagcggggcgcggagggcgtgcaggctgagtgccgcgggacaggcgcgacattggtgctggcgttggcgtcacagacccagggctgcggcgtgctttttggctttcagtctgagatcggcgatgctggagttcttgctggtggtcttggcggctgctgcggccgccactaccgaggcggcggaagccgaatccgcggccagcgtggcgagcggcagtccgaagggcggtgctgggaacatcatgtagggcgcgtgcgcggccaggtgcggatgcaggtggtggtgcgcgtgcgccacagcgctgtccagctgcagctgcgcctgaacctgaaaggacaagggcgtcacgttgcaatgactatcctagggtgacaacagaatagaaacagagcattaacggcgtccagcttggccagagagagagttgggttgtgtttgggcacggggagagggcatttggctgtgcatcttgttccgacagtgaccttctcagcctgttgctgaatctggggttccacatggatactccagtgtcccctgggtctccgaaactcgcttagggtaggcttatttccccggaccccgggaacccccttctgcaggaatgtggccgtctcccctgggaactgggctgaaatggtatattggaaagactgcgggtgaggacccttaccctcttctcttgatgctgccatgcatctcttaccccactaccaaaacaacggagtatcaacaagcaaactacgcaactttttaatgtcattcagggaagttactccatcttcaccacaataggcacaattgtgagtcggtacttctaacctttattgccataacaattacccagggatctcgttaaaattcagattctgattcgcaaggtctaggttggggcctgagattctgaatttctaacaatctcccagacggtgttgttgctgctggcccaaagattaccttttgagtagtaaaggtctccttttaaagtcacccctccctctttcttcagtcattctctcttgtttccaaagccaagcatcaggatgccagagtcctgtggcaccaagagagctaagatctccctaacaccgactctcaattcatggtcacacctatctgtctccccggtccaagtcactggagactgagagctaattcatgacatcacaggcatgccaagcaggggtcctggctgaggatagggaaggtcagacactggttgggaaaggatttcgccctcaggcttggaaagtggggagttcagagcactgggatttcccaggattaaatcattgctgcaggctgtccttttaaaatgtactcttaaaggtttctttatggctaagggattgcaaaggcagggcagccctgggaagaccaagacttctctctttaccagagatgaagctttgtttgcagaaacagatttaaaaacaaaagaacgaaaaaacaaaagtatgagctgggagtacttgtgtttatttttcttctgtcagagttatttaatgtgactaagaggtagaaaatacctagaaaagtatctagagggttgccttagaaataccttaggactaacctctgtattggatttgacaaaatcttaatcaaaaggcttttccttcctctctctctaagggcaatctttagtgtatttttaaaggaccagttactgcccccaggccccttcagggattcccatgaggacagaagggactaggcattcaggcctttaataccgtataggtttttaaagggtagtgggtccactatatcatctcaaaatgattctccaactatgcagacattgacatctgggctcagagacaggtgatgttcaacagttcaagcaaacattcaggtattttcatatttaaaaacagcttgaaactaggctgtacttgcctgctgaaatggcatccttaaagcacctacgttgacataaggtgcgactctacaagcttcaaactggctggcggcccctatgagaacacctgtaaaaagtacaagagaaaaataatgtgaggttaacgtttgtagcatttttcagggttccaaagggtacaagacagaacgaattcctttgaaaatggactattatctttctaaactgcatccaaaatttaaataaatgtaacttactcccaaactttaggactccattaacagcctttgaagattattaagtcaagaactattgtcatttttgaggttcctttttttctgtcattgtaatagtaatattcactacttctctctttgctcagactatcaaatgttccttgtataagaagcatacctttatggagttgattttcttgttttctacatttagctcttcgattttgaaaccaaacctataggttggagggggaaaaaaaataaaacctagatgttatgactaaaaatttttttaaattacaaaagtacaaagagaaaagagtcgtg

SEQ ID NO: 120 - DNA, 4313 bp, Homo Sapiens
gggtttgattttttgagactcggggaggacccctggcagatgtgtgcctagccagaacatttggtaaggactcctccaatgaagaaaaagtggaggaatccagccccagcgagaagaggcttccccaccctgccctagacacaccggacagagggcacactctgaccagagccacgtccagtggccaggaggccagcccagcacctcctcccccaccattcccgtcctgggtgggggggtaattttcctgggagcagctgtgggaactgtcgtttctcatcccagcccagccagcactctgaagcctgcaggggaaggacagcacgtgggatggacactggggaaggagcttcgcaaggccagggtgcaaccttcaggccccaggtggcctggcaggccacgctgcctcggagatgcttgccagactccccaagttcactcagggcctggcagcaacctgctggctgcctctgcgggggtctgggttgctgagcacggtgcagctgcccagggccaatcagccctagggtgtccgtgccaggctgcggcctccccgcctcccccgcactgagggtactcatggcgtgcaaatgctcccgcacccccagagctgccctatcggatgtttccaggaattcacacatttccataaaaatgcattttaaatgatggacaggcgagcctggggtaacaacgggtgtttggtgggtagacaagagcaaatgggaaggagcccgagggaggagggggaagagaagaggaaacagaacttccagttggacattctgacaacagctggaaggaaagtctagaaaagatgaagagagaggaggggagaaaccaactggggctcccacccttgccgttggattcctaattctcgtttcaaatgggccctgctctccggcaaaattagtttaaaggattttaaaacaaagaaaacgagatgaccggtctgggagctcctcaatcagagtagagaagttagaggggggcgggcgacttggttttgaagtcttagctgaacagtcacccctcctctccttggcaaaaaggattcctttagaacctccgaggctcctggatttctcccttcgcaaatggagccgcatactgcattcccccgctctttcggatcgctaagcatgtttcatgagggtcgctgtccccgggtggaatgcggccgtatgcacgcgcctccctgcacacgcacacacacgcacacttacaataagtgtctgcaggaggagtgtcctgcgcgccagctctgcgtttaagacaggaagctgccgggttaccgagtcaaatgggagtgacactattcctctccatcagcaaggaaagcggaccacaaaagtccctttgtatctcggcagctcatttaatattatttatgcattttgtgcaaggaattgtgggatttcgccccacggtaaacaatatggaaatcttaaaaatagcgatcttcctgtgcgtgtccacctacgcgccccggggtgacctggcggggctgtcgccgggtgactcacacccctgaaccgcgaagcgacagggaaagcgcgggcgagcgcaggagacgcggtcgggggtctctccgggttcctgggctcccgcacccggagcgggggacgcggccgctttaaggggaggaggggcggcgggctgctcctgtcacccagcggcggccggagcgtcacgtgggcgcgcggcgccgcggccattggcccgaggcacgtgtccaggagaccggcctgcgacgtcactcgagggggctctgttaaaaataagaacaaaaatccagagtgaaagtgtctcaggttgcgccgagtggcctggaaatttccgagcccgcgcggaggccgaggcggcgagggcggcggacggccggggagcgcgggcggcccagcccggcccggccgggccctggcctcgcgtctctcacccatgcgactcgggccgcggagctctgcggggctcggcgggggcgcggccgcacgccggtggggcgccccggcccgcagcggggcggcggccgcgaggagggggcctccatgtgcgtgcgggcggtggcgggcgcgctgaccgcgggcgcccggcaccctcgagggccggctagggcgtgcgggcggggacggccgggcggcggcggcggccggagccggcccgggcgggcgtgagcgccggggaacgcgctgcctgcatgcgcgcagctctcgccccgggcggcccaggcggcggcgccggagcccgaggcggccggacgcggagaggagcggggagcccgggaggcggcccgcgtccccgccggaccactgcgactgtctagaccccggctgcgcggcgaagtcgaggacttggctctgttgaatctctcatcgtctgggcgagcggggcggctcgtggtgtttctaacccagttcgtggattcaaaggtggctccgcgccgagcgcggccggcgacttgtaggacctcagccctggccgcggccgccgcgcacgccctcggaagactcggcggggtgggggcgcgggggtctccgtgtgcgccgcgggagggccgaaggctgatttggaagggcgtccccggagaaccagtgtgggatttactgtgaacagcatggaggagaatgaccccaagcctggcgaagcagcggcggcggtggagggacagcggcagccggaatccagccccggcggcggctcgggcggcggcggcggtagcagcccgggcgaagcggacaccgggcgccggcgggctctgatgctgcccgcggtcctgcaggcgcccggcaaccaccagcacccgcaccgcatcaccaacttcttcatcgacaacatcctgcggcccgagttcggccggcgaaaggacgcggggacctgctgtgcgggcgcgggaggaggaaggggcggcggagccggcggcgaaggcggcgcgagcggtgcggagggaggcggcggcgcgggcggctcggagcagctcttgggctcgggctcccgagagccccggcagaacccgccatgtgcgcccggcgcgggcgggccgctcccagccgccggcagcgactctccgggtgacggggaaggcggctccaagacgctctcgctgcacggtggcgccaagaaaggcggcgaccccggcggccccctggacgggtcgctcaaggcccgcggcttgggcggcggcgacctgtcggtgagctcggactcggacagctcgcaagccggcgccaacctgggcgcgcagcccatgctctggccggcgtgggtctactgtacgcgctactcggaccggccttcttcaggtgagcccgcggggaccacgcgtcccggctcgccgcggggaggcccgcggagctggggggcggtgctggcgcgggaacttaccgggaggaaaacatctcgaacctcccccgcgcacacgcacaaagactcacgcgacattgtgtgaagctgacgccggcccgggcagcggccaggagtccagcggcaggactgattcgctagggggtacagacttcttaggaccgcagaagggaccttctttctttctctgtctctctctctccttcctctctccctgtctcccctctctgtcttccaccccgccttggcgcatctcttcccagcccctagcccatgtctcccccactgtagttttttttggtgggaacgtggtggctggaagatgggcccggaagtgcacactctcatccccttccctacgatcttccaactcaggccaggccggggacgcatgccccagcccaccccagacttgtcctaccatccggttatcccggctgtgctcggggaagaaaaggcgaggccctttgccgctctgccttctgcccctcgggcctgcgctgaccggtgggactcaggaggatgcacacagggaaggaggaaaataaaggcgccctttccccttggctccactttgtttgccagcgccagcccgcagtggtggggctcagcccccttcctgcacacagcgaggacaagggaggcagccgtccctcccggcacctgccatccccaaatagaaaggaccttctctcagggtttcctgggggctgctgatgggaaagaggcagcattcgcaggggccctgcagagatgctggatatattttttcatagatctgcgattttaaaaaactaagtccatgtccttgtagaaatcatcaactgcattccatgcgggtctgcggctgggaaccgccattagaagtggactgtttgaccccgagctggcagcggatccccgctgcccccaaaccctcaactattttgcgggggtcatttgcccagatc

SEQ ID NO: 121 - DNA, 16197 bp, Homo Sapiens
ccctgcaggtggagggggaaagggcttgggggctggtggaggacgcaggagtatgggggagctgtggaaaagacgtggaggcagagccagcaggccttgctaagggacaggaggtggctctagagagaaaatgagggatcagggatgtctcctggggggtggccagctgggtgactgggagaaactgggaaggcgcagatcagggcagcaggggtagcgggatcgggggtgctctgaagtgaacacgtgaaattgaaggtgctcgtcagccttccagtggaggcatccaggaggcagctggaactggaaggaaatggtgacagtcgtcagcaccgtagaggtggcggtggtggtggttacagctggacccctctgggctggtgggaagtgtggaggtgaaggagcagggagcagggggaggtggagaaggaaacctcaggcttacattttcaccctattcttggctgccatattttcaggaagtccctcttgaggctgggacagagggtggggacagttcagtctccctgagagagtttattctcggaggcctgcggtgggagccagggcgcggcggagagggtttcccacctcttccccagcaagcgggagggaggcgccgggctgaggctgcgctgagctcgagctcgccgcccgggtggacccgccctgttcaagcgcggaggggcggaggcctggttgggttgtagcgtggtgcggagcaggacgccgcctcgtgccatggtcactggagacgcacgcccatcttccctcccgggcccgtcgatcctgccatcttccgctcccggccgctcgtgggtgttcgtcatttagaccttccccgtgcttcatgggacgcaagccctcccccagagttcggttttgcaaaagaggtctggagccctcgctacagatcccctccctgggccacggaggatgagaagggtcaccgagccgagccgtaatcctgcgtaacccctgacctctctccttccctgcccccacggcaccccatcgtcccctccccgtctccgaggtcctccagaaaacagcgcagaattgtgcagatgtttaggagatgtgaagatgctggagatgcttaggaggcgacggttacgcgaggagaattgcttccaggtgcgcttctggaacgcacggagatcccccggcggggaaggggccggggctcgcgtcacttagtgtctgctcaccgatttccctctgaagagggggcccagggcctctgctgagggagcggggaggcggtgcgggcccctcccgggcacacatgggtgtccgctccttcctccccctcccctcccctcgcacggagagcggagagcggagagcggagagcgacagggaggcagccgaagacttgaattttgaaaggggagctggcggcgaatggtgaatgagacagctacttaggaagcgagtccagccagcccgggaggcggtggagacccacgcccggaagtaaccggattaggtctcagaatgtgatcgccccccgggtcccgggggagacgccaaggacgcgcaagcggagggcgcggagacaactgggagtcagagtctccatcacttgggctgggaacgcctctgggcgttccgacggggtggcggtgggggtcgggggaggcccttgagaaccgtgcggcccggggagagcccacccattgctgagccccgacacaggctttgaagttgctgcagtggctcagcccctcccccgtccggccctgcgcagcgcggtgccgcagagtccaggccgtgcctccgtttcgtcgctcagagcttattgcggcggctcattggaccacgtcggtggggcgatcgcagcctctgatctgtgagctgcaaagagctccgaggttcattcacaaatctgcgcccccagccgtccctccacgcacccgagccacgtcccgggacccggagagcccggggcgttgggcgctgcggaggaggcccggcttctgtcgctcccttcacctcccagcccgcgagggacttgggggaagggggagcaagctttcgctccggaagaaacgttcggaaccaaggagtctgactcctggatccgggtgcctgttggatccaggctcccactcccgggccctccggtcgaaccaagggtcccgacagggcccgaggcacccgcattcctaggagacaggagctcggccagggcgcatcaccgggtcctgctccgagccagaggatgtagtgtagacacccacccccacaccgcccctccacagagctcctctccccttggggcgtcgctgggcacagggcaggtcgctaggaatccccagtaaaaccacgctcgctcagaggttcgcggcttcctcagagggcgctggggaaagagaggggacctgatttcttcgaccctcggaggaaaagtgctcggggcctcctagggacacagccctggaagctcacctcatcttagcttaggccgcggcgaggtggggaggagagttaggagagggggagaggggctctgcgccctgcagaggcctttaattctggaggaaaaagactgggacacacccaagcgagccaaggcccgagccccacgcacctccacccacccggggcggcgcacagccagctcctgccgggcgtgagcactcgatcaagggagcaagtggaatgaaaatccagctgggggggtccccatcgacacaactgtcccgcagtcgagcttctggattcctgggagatgtggagagcctggggccggctcccgctccgcagagcagactggactgccctaggtgcctggaatgcgcctgcaccctgtccctcggacccgcgggagacccgtgttccgcaagtcccccttctcaccctagtctgcccctacctacatcccgccggcgagtgtgccaccgcgaggcgcctccttccccgggaagggagctcccttccgcgcagacccgcattgcccttcttttcgctcggttttgttttccaggggtagtttctgcagaaaggagattctcctccgggccgaagggctaccagcctgcagtcagttcagccccggaccctgggagatgctcaccactctgcggatcttgatccgaaatcctttctggccgcccactgcggagagtgtcctcgtagagaggttttcaatcgaaggagcctgggctccacattttgtcttcaagcctgagctttcagggctgctttgcacgaggtgcagatgaacttgtgtctgcaaacaagacagaaaaccctaagtgccgcccgaccttcctcttttggggaacccgcactttgtcctgggagcgtgcccagcgccttagtaccaaactttctggccggggctggcagagctcagagtcccgcttccccctaggcgcggccccctaacatctgtaacccaaatgttgcgccgcggccaaaattagccctggcagtgcgaacagagaactaaaagcaggcagtgaatgagaacagctcgcatttctccttcctggtagacggggaggtgtaaatcccgaggaattctagggcattcgctccaaacgtgggaaatcttcgcgcgtatcccgtttcttcctcccagcctgtgttaatgctccaaatggtgtcgagttgctcaactttgccgtcatcacagaggctgttgtgtcttaggggattaactgatgtgagacacacaaaaccctgcaactccataacataaactatagcacagcctttctggagagggctggaatatttgagtgagtttccgagaggaaaagaggagttttttagaggagaaacagagcacttctataatgtgccctaactgagaaatcttgttctactgagcttttctttaagtggaaccagaagtgctgggatgagagggaaaggatgggagtgcgtccaaaggtggacagcaggtccccatccctggtgggagtgagactggacggcatcccccggaaaggtggtttgggccttggacaaggctagaggcaggagtccatgatgcagagatgacacagtgcccctccgcgtgtgagtccacgaaggtcactactgaggctttgtgcttgtaaaaggtcgccacgcttcacacaagcttctatactcaacacagggattgattgggtacagggatccccccataccatacatgtaagcatgtatgtcaattaaagatgctcgtgctaaagaaacggccaactttgttgaactcagaggaactgatcaatcatttaactaagtagaggaaatgtttgaatttaattcgcaatttagttgcctttttatataaaactatatatctttatttatatttgatgaatgaaaaaagaaatcagttcatgactttaacttaaacatatgtttttaaaaatatatttcccccagcttagccagtatataaactaattgagttctcctggttaagcatgattcagttgtgatatttaagagcgggagtggttgtttagatattttcttcctcacgtgaaacctagactaatgagttatcatctaacaagctgtaggtagtttggctgggctggatccagatggtttgagttaaatctagattgtacttgcctaaaattctgtaaacctctagctacgcaaatcctatttccaaaaatgctgggaagtcactgtataagagtttaagctacactagcctctctgtgattacttgtagcctttggggaaagaatagaagaaaagaaaatgtcagcctctgtgaggtggggctggtgtttcaggggttccttttgaacatcttgttttctttccaaaggtcaaaaggaaggcagtggatacatactagaatttcttccatctgtgaatggtcgcaaggctggagaaggtggctagtgtacttcaaggctcattatccttttctgtgttttccttcctgttttggtaggcttagccagctcaagccttgggtgccattcttcaaattcctttgccaaactaattttacttatttgactggattatttgagaggtgccactttcttctgggttgctgtgattttgagggggcattttcataagagtccaggcattaggtggtgaaacagtctgtgctcccaaacctgcccctcccagggctcccgggagactccagagtgcaggtctgtctggggagtctcaggggtgggccttgagtggaagtgggcccaccttccacaggagtccaaattttataggaataagaacagcagtaaaacaggacaagagagcaggcagggagctgccaaggaaaggcgattcttgggaaggcaggtcacccagaataaggctcccctggcgctggagagccggaagggggagcgggcacagaggacctggtttaggtgtgggggttactagcacaagtagagccatccttcagattctccttcagaagcagctgctttccagagaaaccaggtgagggacagtttctgcatctttacacgccagctctggagatctgcccacctgcccccagccgcccccctccccgggcgagcctgggctaagtatcaagtcaggacagaagggcggtccccagtcggctcctggcccactctgcttccccaacacctagggagcttgggctcagcacaggcgcttctccagcgatcggggcagaaccaggacgtgcaatgcgactgcccccccctccccgctccccggcagagcttctgtccgcgccaacccacccaccaggctctgcccgcgccacgcgcgcccctggcaggcctggggcggggaaaggcgaagcgctgggcacgcgagggcctgtgcaccccagttcctacgacgctcctggcccttttcaggcccgccgctgccgcatttaaccccctccttccgggggttattctgaagaagtctcagaccctagacccagcctcccagaccccgtccccgagctcgcccggtgggcctgtaggccggtcctccttcgcccagaggagagcgcagacacgcaatgtccgcccgttggccccgcccgccccacccctgctccccgcgccccttcgtttcggcctttgtctacaggccgggtcggaacgtcagccccaggagccgacggtggctctctgctcgccccggggaaggtgttgctctcctatcggccccaattccccgcccggcgcctggggcttggctgcggggctcggctcccagccgagggcgcagggctggccaggcctgctttggctgaggtggagatctcgctctcagggattgttgggcgtctctgccccgcgagtaacgagaccgccgcgagcgaacggctttcattgagtccatttttccaagtgtcaccacgtcaagctagagaagcgaggcgagtggaggggacgcagaggggccggaaaagtcacccttctctggcctcgttttcagataaaaacgggagcctggctcggcatccgggcgcccggtgtctccggggcgcttcactgaggttttgtttgcaaaactagcgtccgtgtcctgaagcgcacggcgtctggaagctgctttcctgctcgccctctccgaggcccctctttgtgcagcgagcctgagaaatatggaggaccgtcctccgcaagcgggtggtcgcgggcgctctccgattcctgggtgaagctagagggaaaacggggttcccgggtcagtgccccactttccatcccgggagaaactaatgtccggagagggctcgtctgatccgcacagaaaggccgaccttgagggcggcggtcgttcgggggagaaagcggaggctctgggctcgcgggagcgcggcagccggggctggcatcgcagaggagagacacgccactgccccgcatccccagaaagcgcgaggcgccgtcccagctggggcaggcggccgaggccggtcctcatgcgcgcttctcgaagcttcctgaaacaccttgcggagttccgtgtgtatagaactcagcaccgcccagcccctgggcagctcaactttctgcagccccatcccagcttccccggccctttgaacggtgacccctcttaccgctttcccagagttgtttcgtgtttgggtccactctggggggcccggtaccctctagttatctctctcttcatttatttctctttctcctattcctccctccacctctcaccttcctcctttccaggagagcgacccacgaattcctcttcctccagccaaccccagggcccagcccgcagaccctgcgagggcaggtctctgcccaccggcccgccaggcgccctggaggtgacgctctgcttcccagagtctctgttgcagccacgaattggggtctgggtcgcaggaaagcacagggctgaagcccagcgtcttggggccatttatactgaggcagtcagaggcaaagagtcccaagaattcagaaaatacttctcaggaagccgcctaattggctttcatgggacaggtggagccattaacctgggatggttttgcaggaaccaaagagctcagggcccctcctccccccaatatcatgttcaggagacccagagtcgttggaccctccctttcctgactggtgatcatcagagtttccagagttgcagaaaattctccccccaaaaaaccaagtaagcgtcaataagacttcccacaaactctcaccagccctattttcccggggggcaggtagactgtggggtttgattttttgagactcggggaggacccctggcagatgtgtgcctagccagaacatttggtaaggactcctccaatgaagaaaaagtggaggaatccagccccagcgagaagaggcttccccaccctgccctagacacaccggacagagggcacactctgaccagagccacgtccagtggccaggaggccagcccagcacctcctcccccaccattcccgtcctgggtgggggggtaattttcctgggagcagctgtgggaactgtcgtttctcatcccagcccagccagcactctgaagcctgcaggggaaggacagcacgtgggatggacactggggaaggagcttcgcaaggccagggtgcaaccttcaggccccaggtggcctggcaggccacgctgcctcggagatgcttgccagactccccaagttcactcagggcctggcagcaacctgctggctgcctctgcgggggtctgggttgctgagcacggtgcagctgcccagggccaatcagccctagggtgtccgtgccaggctgcggcctccccgcctcccccgcactgagggtactcatggcgtgcaaatgctcccgcacccccagagctgccctatcggatgtttccaggaattcacacatttccataaaaatgcattttaaatgatggacaggcgagcctggggtaacaacgggtgtttggtgggtagacaagagcaaatgggaaggagcccgagggaggagggggaagagaagaggaaacagaacttccagttggacattctgacaacagctggaaggaaagtctagaaaagatgaagagagaggaggggagaaaccaactggggctcccacccttgccgttggattcctaattctcgtttcaaatgggccctgctctccggcaaaattagtttaaaggattttaaaacaaagaaaacgagatgaccggtctgggagctcctcaatcagagtagagaagttagaggggggcgggcgacttggttttgaagtcttagctgaacagtcacccctcctctccttggcaaaaaggattcctttagaacctccgaggctcctggatttctcccttcgcaaatggagccgcatactgcattcccccgctctttcggatcgctaagcatgtttcatgagggtcgctgtccccgggtggaatgcggccgtatgcacgcgcctccctgcacacgcacacacacgcacacttacaataagtgtctgcaggaggagtgtcctgcgcgccagctctgcgtttaagacaggaagctgccgggttaccgagtcaaatgggagtgacactattcctctccatcagcaaggaaagcggaccacaaaagtccctttgtatctcggcagctcatttaatattatttatgcattttgtgcaaggaattgtgggatttcgccccacggtaaacaatatggaaatcttaaaaatagcgatcttcctgtgcgtgtccacctacgcgccccggggtgacctggcggggctgtcgccgggtgactcacacccctgaaccgcgaagcgacagggaaagcgcgggcgagcgcaggagacgcggtcgggggtctctccgggttcctgggctcccgcacccggagcgggggacgcggccgctttaaggggaggaggggcggcgggctgctcctgtcacccagcggcggccggagcgtcacgtgggcgcgcggcgccgcggccattggcccgaggcacgtgtccaggagaccggcctgcgacgtcactcgagggggctctgttaaaaataagaacaaaaatccagagtgaaagtgtctcaggttgcgccgagtggcctggaaatttccgagcccgcgcggaggccgaggcggcgagggcggcggacggccggggagcgcgggcggcccagcccggcccggccgggccctggcctcgcgtctctcacccatgcgactcgggccgcggagctctgcggggctcggcgggggcgcggccgcacgccggtggggcgccccggcccgcagcggggcggcggccgcgaggagggggcctccatgtgcgtgcgggcggtggcgggcgcgctgaccgcgggcgcccggcaccctcgagggccggctagggcgtgcgggcggggacggccgggcggcggcggcggccggagccggcccgggcgggcgtgagcgccggggaacgcgctgcctgcatgcgcgcagctctcgccccgggcggcccaggcggcggcgccggagcccgaggcggccggacgcggagaggagcggggagcccgggaggcggcccgcgtccccgccggaccactgcgactgtctagaccccggctgcgcggcgaagtcgaggacttggctctgttgaatctctcatcgtctgggcgagcggggcggctcgtggtgtttctaacccagttcgtggattcaaaggtggctccgcgccgagcgcggccggcgacttgtaggacctcagccctggccgcggccgccgcgcacgccctcggaagactcggcggggtgggggcgcgggggtctccgtgtgcgccgcgggagggccgaaggctgatttggaagggcgtccccggagaaccagtgtgggatttactgtgaacagcatggaggagaatgaccccaagcctggcgaagcagcggcggcggtggagggacagcggcagccggaatccagccccggcggcggctcgggcggcggcggcggtagcagcccgggcgaagcggacaccgggcgccggcgggctctgatgctgcccgcggtcctgcaggcgcccggcaaccaccagcacccgcaccgcatcaccaacttcttcatcgacaacatcctgcggcccgagttcggccggcgaaaggacgcggggacctgctgtgcgggcgcgggaggaggaaggggcggcggagccggcggcgaaggcggcgcgagcggtgcggagggaggcggcggcgcgggcggctcggagcagctcttgggctcgggctcccgagagccccggcagaacccgccatgtgcgcccggcgcgggcgggccgctcccagccgccggcagcgactctccgggtgacggggaaggcggctccaagacgctctcgctgcacggtggcgccaagaaaggcggcgaccccggcggccccctggacgggtcgctcaaggcccgcggcttgggcggcggcgacctgtcggtgagctcggactcggacagctcgcaagccggcgccaacctgggcgcgcagcccatgctctggccggcgtgggtctactgtacgcgctactcggaccggccttcttcaggtgagcccgcggggaccacgcgtcccggctcgccgcggggaggcccgcggagctggggggcggtgctggcgcgggaacttaccgggaggaaaacatctcgaacctcccccgcgcacacgcacaaagactcacgcgacattgtgtgaagctgacgccggcccgggcagcggccaggagtccagcggcaggactgattcgctagggggtacagacttcttaggaccgcagaagggaccttctttctttctctgtctctctctctccttcctctctccctgtctcccctctctgtcttccaccccgccttggcgcatctcttcccagcccctagcccatgtctcccccactgtagttttttttggtgggaacgtggtggctggaagatgggcccggaagtgcacactctcatccccttccctacgatcttccaactcaggccaggccggggacgcatgccccagcccaccccagacttgtcctaccatccggttatcccggctgtgctcggggaagaaaaggcgaggccctttgccgctctgccttctgcccctcgggcctgcgctgaccggtgggactcaggaggatgcacacagggaaggaggaaaataaaggcgccctttccccttggctccactttgtttgccagcgccagcccgcagtggtggggctcagcccccttcctgcacacagcgaggacaagggaggcagccgtccctcccggcacctgccatccccaaatagaaaggaccttctctcagggtttcctgggggctgctgatgggaaagaggcagcattcgcaggggccctgcagagatgctggatatattttttcatagatctgcgattttaaaaaactaagtccatgtccttgtagaaatcatcaactgcattccatgcgggtctgcggctgggaaccgccattagaagtggactgtttgaccccgagctggcagcggatccccgctgcccccaaaccctcaactattttgcgggggtcatttgcccagatcacagcaggagtgagccaacccttgggccgccatcccgcagaactatgcgtgcatatttctgatgaaattcagatttctcagctagatctgaaatttgctccattgttctcgtcttcctcctttgttaatatttaattaacatacaggctcacaatgccgggcgaggagactcggccgggctttgtgcggcgcgggagttcgctgagccagcccccaacggcccgggagctgggcagcaccgcccggcccggcctggcccggcccagctcagcccagcccaagtcgcctatcttcatgggctttaaaatatccctgcaagataatgtttctgttctttggtttctccgaaagaaaggggagagagagttttcttggggaggtttgattctgtttctgagactcctaagtatttgtcttttgaaagaaaatcaagaaaaaaacctaaaaattattattttagggaaatttattgccataaaatggtgtccttttgcgggctgcttcatgagtgcattaacaagagccccaggaccagaagagtttgggggtagagttctggggaagggagtggttggaaacccagacagagatgggctctgggagcaggaggctggggcctctcctggagccttgtgccccatcccccaccaccgttccggagggccaaccccatctccaaatctgcacctacccctaccaaagccaggcccactggcctggagccctgggcgtgagcaagacaggcactgagtgtgtacgtgtgcatggggtgggtgcccaagtatagggtgtgtgctctcatgggtggtgagcctgcctatgggttgctttaaaagctgcccttggtgctcctgaggtggtgcccacagatcctctttctccaggcctgtctcctggagagagcacaagactcacttggccatgagggagtgcttggcattcaccctgggcctccagttcgtcccccacctcttgctgggcacagccccagcaccctagttgactctcctgacctgggcagggtgcagtcccagggcctccaaggagatccacattcctcttctcctcagtgtgcccggcagctctccggccctgaagggtggggggcccccagccttctccagccacagggacctgtgatgaagctggggccagatgctccctaaagccgattcatacaccgcacaaattgaaacccagaggcgaggtcaccactccctgccagtggccttgcccccttcttcccccacagggaacgccagggggttgagcctcttatcaccaaaaagaaactgatgacacttccctccttctgctctcctccctctgccctttccccatggatagcaggtcctagaagccttacagcgaccctgtccaaaacctggggcaggtccacagggagaaggccaggtcaggttcataagtctgaatcccagttgggaggcacagtggggagggtcagaagtggacctggacaaggtcagctgggctaccctgctgcccacagtgaagcagtcccatgtctggggaaagggtggtgcagtcaacacccttgtagagccaggtcccctctcctggacaggaaacctgggagatttccagtgggtgaaggactcacccactgtgagtagctcagtgcccctccccaccaaggagggaagtacatgcactgactcttccttaaaggaatgaacttgggtccacagagcccttggctgggagtcatagaggagcttgggtggaggcagacactctgggcccctcctgtcctcagggcccacctgcccctgattcccacagcccttggcaccctgtggggtatccccatgagggtccccatcatagccctcagggcgcctcctgcttctgtgaccgccctgcagcctttcccagtcttctctcctcccctctctctcagcacctaccgccatccctgttcctgaacagagagcctcagaaaggactaggaaaaaccaggccagaaagtgtggggagttttgcttacatccaggagttttacttttatctagagacccctcatttgtggtcagcctgcccactaggcctgccccatagtcccacttacatcacacgcagtcctccctcaccaagtggtggaggtccgcgttgagcccatgcccagtccgaagtctagccccacatctggcggttcagcctcgagtggccttgggcgagtcacttccctcttggggccccagaatccttacccggtgcctattgggtggcacacctctgggtaacctgacttctctctgtccaccgtatctacccaggtcccaggtctcgaaaaccaaagaagaagaacccgaacaaagaggacaagcggccgcgcacggcctttaccgccgagcagctgcagaggctcaaggccgagttccagaccaacaggtacctgacggagcagcggcgccagagcctggcgcaggagctgagcctcaacgagtcacagatcaagatttggttccagaacaagcgcgccaagatcaagaaggccacgggcaacaagaacacgctggccgtgcacctcatggcacagggcttgtacaaccactccaccacagccaaggagggcaagtcggacagcgagtagggcggggggcatggaggccaggtctcagtccgcgctaaacaatgcaataatttaaaatcataaagggccagtgtataaagattataccagcattaatagtgaaaatattgtgtattagctaaggttctgaaatattctatgtatatatcatttacaggtggtataaaatccaaaatatctgactataaaatatttttttgagttttttgtgtttatgagattatgctaattttatgggtttttttcttttttgcgaagggggctgcttagggtttcacctttttttaatcccctaagctccattatatgacattggacacttttttattattccaaaagaagaaaaaattaaaacaacttgctgaagtccaaagattttttattgctgcatttcacacaactgtgaaccgaataaatagctcctatttggtctatgacttctgccactttgtttgtgttggcttggtgaggacagcaggaggggcccacacctcaagcctggaccagccacctcaaggccttggggagcttaggggacctggtgggagagaggggacttccagggtccttgggccagttctgggatttggccctgggaagcagcccagcgtaccccaggcctgctctgggaagtcggctccatgctcaccagcagccgcccaggcccgcagcctcacccggctccctctcctcaccctcctgcacctaactccctcctccttctcctttttcctcctcttcctccttcctccttcctcctgctcctcctttcttcttctttttcttctcctcctcctccttccttcctcctcctccttctctttcctcctcctcctcaccaagggcccaaccgtgtgcatacatcgtctgcgtctgtggtctgtgtcgctgtccccagtcccaccgcagtcctgccgcaggcctaaccctcctgccctgggcactgcctccatgcagaagcgcttcgaggttctggggctaaaggcctggggtgtgtggcctaaagcccaagagcggtggggcgaccctccttttggcttggccccaggaatttcctgtgactccaccagccatcatgggtgccagccagggtcccagaaatgaggccatggctcactgtttctgggcgggcagaaggctctgtagagggagatggcatcatctatcttcctttcctttttcttttcttccctatttttttctttttttcctttatttttttcttttcttggagtggctgcttctgctatagagaacattcttccaagataaatatgtgtgtttacacatatgtctgcatgcatgtgaacacacacacacacacacacacaccaggcgtgtttgagtccacagttctgaaacatgtggctaccttgtctttcaaaagaactcagaatcctccaggatctagaagaaggaagaaagtgtgtaaataatcatttcttatcatcactttttgtcttttcttgttttttaaaatatacattttatttttgaaggtgtggtacagtgtaaattaaatatattcaatatatttcccaccaagtacctatatatgtatataaacaaacacattatctatatataacgccac

SEQ ID NO: 122 - DNA, 2609 bp, Homo Sapiens
cgtagattagagatgactatagattttccccagcgcggatcaaagggactgaattgaacgttttagcttaatgatccaacccctgtcacacccacagggacgcgaattccgattttataagcaggtgtgcacgtgcactcagatactcacacaaagccgcgtggagggacgaaaagatcaaccacccgatcgacgaggataggtttgatcttttcgattacctcagtgtgccagtgtatattcccggctgggcctagcgccctaagaaacttcggaactttagctgttaatttttgttttcttactatgacttcccaaagacattctatctgcctaccggggcgaagagaaatgggaccaggcgtcagggcggtgggaccctgtccagggtcctgactccgcgccagggctccagaccagtcggcctccgaaggccctttcacccaccccacacaagaggaaacaaagacttctcagctcaaggcctcagggctgcctcctgactccggtcagtttgcaggaagaggaaacaacaaaacaaaggaaccgccaatccgccgggtattatatccctcagctccaacctccgacttcggaccgccagggtcaccttctctacgctgaccccgcttttcttaaatgaaaacacgccaacaaaagcatacttcggatacaaaatccaagtacgcatcttttttggggaggttagagctgaggtgtacttcggaagatgagaattttgttttcatgaattgggtaacacccaggcattgttaggtaccccgacagaccctctagatatccttctcttcctccttcacactttcttcctatcaaaatagttattgttttgaaattcactagaacaacgacgttctaaaaacaaaggcgcagcaagcatccctttcttcgctgccgcgggctgaaccacggacgctcgcgggtcgcccagccccgacggcccgcagggggcgcgcgccgcagccgcagcacagcccggctacccccagaaagggagccgaatggagggaagcagggagcgcggagggctcgaggcttgcagataaggagaggcgcatcctgggatttgggtcctctgctgctacaacacaaccgtgctattgttggcactgtccgacccaagtgtcggtggtaagcggcgatgtcggggctgggtctctagcaaccgctgtgccctgggtcaggctggtcgccccagctaccgggatccctctccggatgcttccagggcgataggtgctgcacccattgacgggatagccgcatacctccgaacaggtagtggagttcgtctctggcaggcatcctagctgcgctgacaccaaggtcgccacacaatagccatcagccccccttaagccccagaagtaggtttcccctgccccagccatagcggttccagtcgtcgccacgagcccacttcttatccccaagcgcacctccctctcctcacccgggtttatgcccgttacacagagagaactacacagggggaactatggtcctacaccctcgaggggacagacaccggccgtgagacaggcaccacgcagagccttctggtgactgtccgcaggagcgagaccttttttggttttgcagtcggctaggtgtgtgtgtgtgagggtccccagttgactaccgggatgcactgccacttttcggcctggcgggctctgggactccttggtctccgtaggaggccatcctaggccttcggaggaggcgctcccagctggcggcgcccctcgccccgggctcagaggcggacacggtcggtcgcgccctgctggccctttgttcgcgccgcagcgggctgggagcagctgcgcgacaccagacccacagcgccaagacgcgaagcgcgaggaaaccgctgcgcttgactccttctcccccaactcttggacccaggaacgcttccagctcctgcgtcccacacgcccagtcctggcttctctcccggcccagaagtcttcaaggattgaagggctctgcctagggccccgcactcctgcctgactcccatggcccagaaaagcagggggacatttgaaatgtcaccccgggataaatattaacaaaaaagcaaatggacttgtgcaggggccagttatcaatcaaccaggccgcaaggccactcagggcaaacacagcccaggttgggctgggcgagactttctcatggccgccccccgaccgaacccctccccccttggctcaggtccttcttaggtcgttctggggcaaacaccggacgggaagggggcgccgccaactcccccgcggggtttggaggtttcctcgcctccaagtcccgcagggcagggtcggagtgcccaacacccacccccgcccgaacctcgggcctgcgcgccgccttcccctgggtccgcggtgctgcgcttgctgttgggtgtgtgtcgctgtctctttccgagccggcagctcctgctgtgtggccgaagccctctggaatctttaattggaaactaatcttggtcttgatagacgcccacgtcagaggcgcgccacccacccacaccccccgcctcatcccggaggagacgcggcgagaaccctgtcgc

SEQ ID NO: 123 - DNA, 11667 bp, Homo Sapiens
cgggacccgtgggcgccaatcaatgctatggtggcggagagtaaaggggacgaacacagcctggggccatccccggagtcccccagcgtccgcctgtggccgtgcctggttggccgcggatcccggcgggcgccgcaaagcggcgggattgccagcgcagagctccggctctctgccttgtccctgggtccgagcaccggagcctctggtgtctgcggggagaagtctcggattgagaaatacgggagggtctcgtcagtggctgcaggtgcggcagccactctggggacccagtgagaatggggtcgcctggctctgcgcgaacccctcacgtgggtgcagctcctgagccgccgagggaggcggtggtaatgtcgcccagtgccagcagagggcagcctcgaggccgtgagcccgaacggcgacctcgccaaaccgcgggctcccttccagctcccggattctgcggggtagaggcggccttggagcccagagaccagcgacctcagtctgcaggagcccggcgcagaggcccaagggcacccccgggatgtggtcaagctacagcccttaggcagcctcactctgcgacggcaagggcttagagggtggagggggaccagatgccttaggaggggttagaaagccaacgcacacagggaatttgttttcaagcaacagattccaagcatgtggaaaccttttaaatgatgctggtgagagctatgatagttttcgcattcttggcgagggaagtcggaggctagtagcgggatggctcctgggcgcgcgggagacagagggaccagcgatccttgctgggggcagagggactgtggaccaaggatccagacacacttaattggggattccagtcccgactgtggccactcaactggcgttgaacttgagcaactcactataccgctctagcctccgactaatcacttctgtaaaatgggcattgtgggctccgagtctcgtaagggcgctagggattcgagacagcaggaatttcctcactgctccagcaaccctgggttcctgggtttgtaggtgggctgaaaggatcctttcatcgcacgtttgcctggcgtggctgctttagagaccgaggcccgccaggctttgcaacccagttgcgcgtggtcagccatggccttggaaccgccgggatcgcctcagcggcactccggccagctcccgacttcccgccctgggcactagggtcacccagctccagaagatagtgcttatcagcacaggaattgagaccccacacccggcgcagtgggtctcccaggaagcctggcgaagagccaaggcccgccggacctgaggtcgcctggggcgctaaacagacccatctatgagcacattcggccaacacacccaagttcaacagtgggcgggatctttggctggcctcgatctctctcacagtgtgtgcaaacgggtacccattagattctttttgcttgtttcctcatctgtaaactttgaaaggagagtatttcccggggtgattctgaaaatcatgccagaactgaaaaggcctgtgtaaatgcgaggtgtaatgatgacttattagaagcagccagccctgtacgtgcctgtaggatagatgctagaacgttctacaaatgtgtgcacatacacatcacgtatgtgtgaaggtgcacacctgtccctagacacttgacaaatgcacacacgtatgcgtgtacctctggctgagagcaaaggggctaatacagggctcatacaggacatcatcctgcagtcttgtgcgtgcacagtacacacgcgagcacgactgtctgtgcctggagacaccgtatggcaccggaggagctgctcagccgtcggtgccacctgggaagtagggtttcgggtgctgctctggagcgcgggaaagtccggatccgggtctgctggtcagcgcttcggcgccgccgggctcctttatctctcatccgccggccggtgagcggctccagtttcaagacccccgatcctgccggtgaggggagggagcgagaaggagtgcgctccgggcccaagaggctgcagggccccactccccaggtctgtcgtccttcctttatctcctcaggtcacacccccacttaaaataaagaagggtgcctgactcattcaggtcagggaagtcggcccccgggagcctcctgccctcacaagccatggtgaagggaggcgaagccagggtttgccacggcctgggagaaaatgcggctgcagggtctctttgggctgcagcgctggcccggggccccaagactgttaaggtgtgtgtgggaggcgcgcagtgtggctaccgaagagccctccatcaccgcaccggcaggccgccgggctcgtcctcctctcatgcttccaagggttctgagctgcgcagcactcgcatcacccagaagtgtctgtggagaaaacgacctcaggtgtaagcccaaggctgctgcctgcaaaggcaatgccgtggagactgggttccacagcgacctgggtttttaagtcaccgaaagctacagggcagggtcacaaacactctcccgccttctctgcagaaccgtgcggctgacaggagagcgttgcgcagaaaattcgaggccgggcgctggaggagtctccgcggcccggagaaggcacagaggcgcccctgagaggcgcagctggaacaggcgatgcacgggttcggatctggccggccaaccgagcccagcggtcgcgaaaaccagagtcgccacagaggttgagcacgattccatttctggggatcgggtccggtggggagccactgtccctaacgcctccagagactttaagtaggacaatataatgctggtaggagcaaggtgcaaggaatttagcggcagaagcctttcgggggggtggggaaaggcagatccgtgcctcgtctgagcctgggggtggggacagcccctggccttgtagcccctgttccggggatcagctgggcccacctaacccccctacatggggttgaaaggggccaatgggacggccccgccgcccctccctcgggattccacagggccctgacccggcctttatctctgcacggtcagcagtcgcgggggcttcaggaaggaggacaaaggcccggtgtcaccgcgggcgggggctcggtttcctggctctctgctcacactcacagcctttagcggttgttgggggaagatttttaaaaatatgtgtcgaatttcctttttttctcttctagaaacaaacaaacaaaaaaggcaaaaggcgaattccccttcactcctcgtccatagagattaaagtttcctgggatcctgccctttttttttctttgactgcctagaaatacttgttctcccttgtacatagaggaaaatgcggggaaaggttttttaaaactcggtttcatactattattattactaaggacaaccgggcaggctgaggtcccaacgtggatgatccgagttggcctcgcgccggggctctgcagccactgccctgtgcgctcagcacctctgggggcgatcagggcccctgcgcttccgcccgccgcccggcagtcgagagcaccctgtgcccagactggccgactcattctcccccgaattttgtttagagctggcaagggggacttagctcgcgccccaagacctgggcttgcagcgccgccaacaggcccggggacacgaggcgctccaggccggggtcttcccggctgctggcccctctcgctccccacccgctggcggcgcctcggtcgcccgcaattgacccaacccgcttcctgcgtttgcccctcaggtttcccgtttctccacaaaggcctaggggagcctcgcccacaggctgaccctgcaacctctggcccggtggctaccttctgcttttctgaaaaagaaaaggaaaaaaaaaaaaaaaaagaaaaaatcaaccagtcgagggaggcgcgtgaggactggaggcgccagccggacagcctatgagtaggtccctgggtcggtgccgcttcgcgggtcagcacggcctttctcagagaaaacctcctaaacgtgtgaagaccgctttgggggaagcgagagggaggttggaggagccccgggcggggtctcagcgcccaccagctgtgccttcagggcttgggtgttcgctgcaacggcaaccgcgtgagcctcactcccacggccaaggggctagggcagggtggatgcaatcgcgtgcgcctggccccggaaggtgctcgcagggggtgcctgtggccagctgggttaggaagtcaaatcctagaaagttattactaaaggttttttttcccccttcctttcttctttccttttttgcttccttccttccttttttttttttaataggggaagggaaaaaacattattgaacatctactataaactgggcacttaaaaattagaaaatttaattattttaataattctgatacacgcacgtatttctgttttatagaggagaacactgaaatttgaatgggtattttgcccaaggttacatagctgttaaagaggacaccaggctccaacccagttcttcctgactaaacaggccaggtctttgcctcatgctgcacaggccacctccgcgaagtgacaagatcccagaacatgcttttcacagctcagcaccaagcctgtgcggcaaacagcctgtgcagcagcagtttctgtggtacagaaacaaacaaaaaaggcaaaaggcacagctcagactgtgcttccttcttctcctgggaggctctcccttactactcctgggaggctctcccttactacgcagctcccttgagcatcagtggcagctaggctcagctgctgtcaagtctcctttaaaaatttcggaggccatttgcctcacagatacctggaagacctctggttggtctcttctcttcttaggacctgagattcctcaaatgtaatgtaattttgggttcctagacccaagacactctttttatgacagctgggagtcctctctccagaaagtggaaagttgctaagactgctcggttttaagaatccttaattcctggttgtcccgaaggcatggggctcttagtcccatcctttccccatcttttctatgggtcccacagtctactccaagaagtaggggctgccacacagtggtggtaggcctgacgggcagggccccagggtcaccaccaggttagatctgcagaatggggacactgcagggatgctgagcctgatcaagatgtttcctggccttagacccccacccagaagccaggagtctggtccggtgatcctgtccatgaagcctggcccagaccttcataaagggaagagctcagttgagagcaaactatcttgggccagactcagattcctggcccatattctgcttgtctggctgcatgaagcctgggtctggccccaatttccacccgccgccagggggctccttgcagccccatctccagccttggcttccaggaaaccctggcaaaggctggatgcacctaacctcggatgaaaggtccagggcctcttgctcatctaagcctcagatctggagcagtgaactatttactgatgcaagctggaaacaggacgtcaataccctctggagtagggtacaggaccatctccagaactccgtaggtccctttcccacagtcccttggtgcatgtacttcaatggcgaagatttctccaggtccctcttgagaacaggacacctccccctgctttctccaaaccaacccacttactctgactgggcaattttagtgaggtggaggtgactctaagaatttctgtgtaaatgtgaggagagggctcatactgtcagcagtgtgtgagatgtttacacccaccacacacataatcttcatgcaagaacgactcattacccaggacattcagaaattggctgggtatttgtattaaactctatttacattgtatttacacactggccaatatatatacacacactcacatggcccagccatctaggccagactgtatatgctaaggcataattgctatataactcaaatacttttgccctcaggaattgcttaaatcagcttctataatagaaactcaaaagtgcgaagagggagagaagagaaaggaaatgagagatgaagaaagcctgccattgaactaaactttcggccctggggaaaatgaccaaacttaagagctttggagaaatcccgagggctggagttagacagatttttcctgtgggcatccatggggaagtggggtatgatttggctcccttctctcacctccttcaatccctgtgtagacccaggaaaccctcactgattgcttcattttgtcttccttacttggtgaggctgctgctctcttcccagccttgggtgccttttgcctttcagttctcggggaggagacaggctggtccttcattgctggccccggccaacttctccgtctcactggaggtgggctgctacctgcccaccagggcttggtcctggaagcttccctcccttgctttctctgcttgagacggcagttgggggagtgctgacagccagcttcagaacagggagcctctgcctgatgaagcaaaggctctgtccatattactttatttttcagcaagccaggaatacacacccacaaatgcacacatcaccaatgaggtatgaatgccacacacactgtggtcccagtaagcacttcctaagtgttagccatatgattattacaatgccaaaaatatatgcccactctgcaggcgaatgacagacacacacacctcccaccctgtcaccaatacacaactgacactgtacacacacatttgcagcagatacagactacacaattacttgcccatgggctaaattttcacgctagacaaagcacaaacagacatgcacacagcaggctgctttctgttctgcaactccccttagccagatagtggagcagccgggcaccaaaggcacccagacaccaggcctgaccagcctctagggcttcctgctccagctgagcctccctctccatcctgctcctgccggttcctggtaagctccagtcccagtcttgaggtgatgccccctgagaatccccgtggcttggtctcctgccttgtagcctctcgcaggatgcctgtggggggcggggggcattctgagcagaagccacttgggcccaactatacataacaggataccaccctgaggttcctaccgcctgaccactggagggctgaagtgagaggcctgcaggctcattcccgtggcgcaaaaccgctcctggcccaccagccggcctggacctgccgccacattgctggccaggccccgagatagacggggggggggcagtgagggctgggtgcggggtctagtctcagctgagcagcagcccgcaagaaccggcggatctatcctatcagaagtcggaagtcatctatcccatcagaagagtgaaagccgaccaccccctaatccgcctgggagaaccagactgcaaccaggtcaaacgcctgtgtgcctgcgcggaagcatggatcttaattcgttatttggggatctcagtaaaggaagagagagaaagaaaaaagactaaatttctgcagccgcgaagtatgttcaatccttactgaaacctccaaatctcctacccatatctcaaggtaaatgaattctgactattaaaaataataaagcagtcacttctcacatttgtacagaggttagcagtttgcagcgcatttccacaaccagaattttatctattaatgtttggaacaaactcttggctgttatagttgactcaaaatcgaaaagtttgagaacaataataaaaacacagccagcccatacacctagtacaactgtgtatgaggtagaatacaaacttgaataggtacaaaaataaaccaagtcctacctacagtcgcgccttgtgaacgaaccacggcagaaaaagtctttctgctgacgttaaacagccgcaacgggccagtgatgacacagaaaacaaacaatcccaggaaaacaaagcagcagcgacagccacaaacgcctgccaccccggttgctctcaatctttgtttaactcattctgaaaaagataaaattttgctgaaaatcttcctcttttaactagctgctgaactaaggagcgacagaaataaagaagtccgtgttaaaagaaggaacacaaaatttattcgggaatcgacaaggcaaaaaacaaaaacaaaacaaaaaaacacaacaaaagtgctctagttctctctagaaaatttggtcccccaaacaacaagctacagtacaaccaggtctatggttttcgggccgggccggctccgggccacaagaccgcctaggtcggccgctgccgggtttcacatttctccttcccaaggtgggagaagcaggaggtttgaaaaacaaaaagcagggaggacgagccgtcccagcagcgtgggccaggcaggcagtgatctccctgcctccaggacttgcatcgaaagatccggggacatttgtttttgatttttttcttcagatagggagagggtgaaacttccccaattggtagacgaaaccatcttttattggatatattctcctaactctgaacacagctttttgaaggcccaacaaaaactctaacgcaaatcttccagaagagaagatgaggaatactaaagcttttgattttcatatttggatttagcaaactccaaggccacaatacttccccggttgcccggtgaattttttttcctttttttttttttaaatactctcttaaaaagttccaccgatctttcaaacaaaacattagccagccgccggggcccggaggtgcccgaagcgacgggactgatagcggaggaaacgcagcctccctccgcgcccgcccgcggtgtaaaccgagtacaggccgtggagccaggctgccccggctcccgctgggtcccaacccccgccccgcctagtgggccccgcggcaagcggcttctgaacagcttcaagagggttcgcggagcaaacacacgtattggtccgtccctttctcgggcagcgcggtcccgccatcagtcctgtccggcgcgtctagccatggactgcacggcagtcgggcggggaacgcggagagcgagcgcaccgacctgtgagagaaggccaagaggtctgcgctgccgacgcccggtcgcacctccgccccgggccctttccgcggtgaatttgggcaggagacgctggggctccggaaagagacgagcccagtagaaagcgcgcagagaggcagcttcaggccaggggagtgcaaggtcacagaggtcagggaggtgagcacaggaggacataaactgaggggacaaagaggagcgacaggagcttaggaaagcgaaaaagcacagagggaccctgggcgctggctccagaggcgggcccagagggtgtgaggtcaggctggcggcggcgtcgtcggctgcgaccggggccggcgtcgcgcgtccctgcatcctcgcatccgtctgcaccggcatgcggtgggctctcagagatcgaggcgcgaatgcagcgcgccggtcttgctgtcgtggtcccagtaagagcaatgcatcatggcgagctcgggctgccgggcacaagcgaactgcaggcccggcgcactggtgggcgcgggcgccgggggcgcggcggtggctgggctggcagggctgagctggcccggcggcggcgcggcggccccgtggtgcggtggggcaggcggcggtgcggcggccgcgtgcagatggtgtgcgtgcggatgcgggtgggggtgcggcggaggcgggggtgcggccggcgggcctcccaggccattgtacgagttcactacgccggggggcagcgccatgctctgcacgcgtgtgtacggcccgtacgaggcggccgggcccgccagccccttgaccacagcggccgcgccagggctaccggggcccgcggctgcagccgcagctgctgcagccgctgcggctgccgccatctggcaggaggcatagggcatgggtgagggaggctgcggtagcggccacgagttgttgaggaagccagactgcaggtacttggggggcgccaggtagccgtagccgtcggccccggcgcccgccacgccgcacccgcctgcggcgcctccggccccgaagagccccttgccgggctggaagtgcgcgggcggcggccggaagggcctcttcatgcggcggcggcgccggtagttgcccttctcgaacatgtcttcgcaggccgggtccagcgtccagtagttgcccttgcgctcgccgccgccctcgcgcggcaccttgatgaagcactcgttgaggctgaggttgtggcggatgctattttgccagcccttcttattcttctcgtagaacgggaacttcgcgatgatgtactggtagatgccggacagcgtgagcctcttctccgcgctctcgcggatcgccatggcgatgagcgccacgtacgagtacgggggcttctgcgccgggtccggcttctccggggctgtcccgccgccacccccaccgcccttgcctgggctcggcggcggcccttctggctccttgactgtgcgaccggtctctggggccagcagggcccccgccgcgtcctcgggctcggggtagctggccatcatgacaaagccggcgcgccgcggccgggccgcctctgctctccgctccaggcgctggcgcggcaaagagttggggcgcacgagtccgcttacggccaagtctcaaacttctggagactgcggatgccgcccgcgcttgcttgctggaggcctgtcgctgctctcccctctccttccccttcccctagggagcggccggcgggagtggagctcagcctctggccatggggagtccgcccaacagagaggggctccggcctcgccgcccctccccgctcaggccagtccccgccttggtgggttttcttttctgcgctcttcccctccccccgccccccggtttcccgaagcacgacccgcgtctctggcggagctgcctcctggagtccctagtgcgccaggagcctcgctctgttctgattcgtatgggctccaccgagttccgcttgcgtcaggcgccttcgcccctatagcggggcggccagccgcgcacgggcgagttcatctccaagtcactttttgtaaacgccccgcacagcctggaccggcctgcccccgcccagcgagcctcaggggcccagccgacagccaggctcacgcgcccttgaaatctgccggtactcgctctgcgggctgggctgggagatgacgaggaccccggtggggtctgcccgcacccggccaaagcccaggaagctcgggccccagcgaggaaaggcgctccaagcctcctcgcggctttcaggtgaaagaaaacgactcctttgctctgccgtttgctgccgtcttgaggctgaacttctagctcggggctggggaggggcgagacggcgagggggctggacggggtagggtggggagagctgctctgaggctttgggaaagtcagcccagaaacgggtgtgactgtacgaagaagcctcggcctggcctgtccctcgcg

SEQ ID NO: 124 - DNA, 1394 bp, Homo Sapiens
cggaaccccggtccgaagccgagacaggagactggatgcgaggccctcccagagctggtttctctcaaacaacttccaaaactcctagatcctaggggtacgccgaaatcccccaaagcagtccaaagaacacaacgagagtcctaacatcccaggtggcggcgcgctggctccctggagcggggcgggacgcggccgcgcggactcacgtgcacaaccgcgcgggacggggccacgcggactcacgtgcacaaccgcgggaccccagcgccagcgggaccccagcgccagcgggaccccagcgccagcgggaccccagcgccagcgggaccccagcgccagcgggaccccagcgccagcgggaccccagcgccagcgggtctgtggcccagtggagcgagtggagcgctggcgacctgagcggagactgcgccctggacgccccagcctagacgtcaagttacagcccgcgcagcagcagcaaaggggaaggggcaggagccgggcacagttggatccggaggtcgtgacccaggggaaagcgtgggcggtcgacccagggcagctgcggcggcgaggcaggtgggctccttgctccctggagccgcccctccccacacctgccctcggcgcccccagcagttttcaccttggccctccgcggtcactgcgggattcggcgttgccgccagcccagtggggagtgaattagcgccctccttcgtcctcggcccttccgacggcacgaggaactcctgtcctgccccacagaccttcggcctccgccgagtgcggtactggagcctgccccgccagggccctggaatcagagaaagtcgctctttggccacctgaagcgtcggatccctacagtgcctcccagcctgggcgggagcggcggctgcgtcgctgaaggttggggtccttggtgcgaaagggaggcagctgcagcctcagccccaccccagaagcggccttcgcatcgctgcggtgggcgttctcgggcttcgacttcgccagcgccgcggggcagaggcacctggagctcgcagggcccagacctgggttggaaaagcttcgctgactgcaggcaagcgtccgggaggggcggccaggcgaagccccggcgctttaccacacacttccgggtcccatgccagttgcatccgcggtattgggcaggaaatggcagggctgaggccgaccctaggagtataagggagccctccatttcctgcccacatttgtcacctccagttttgcaacctatcccagacacacagaaagcaagcaggactggtggggagacggagcttaacaggaatattttccagcagtgagcaggggctgtatgggacgcgggaggagctcagaggaggcgcggagagtgcccg

SEQ ID NO: 125 - DNA, 6357 bp, Homo Sapiens
gtgtggagattgggaaggtgacaaggtgaaggcaattgaaggaagagccgagggggacatggggaaggattttgtttcacccctcctaagttgaaccattgtcctttgaaggccggctcctggagaaattaaagggcccctgtgtgacacagccatgtcatacataaacagaactctgaagcctatcaactcctgaggctaagtaagagggaatgtaggggccaaggcagaagagaaaccaaaacctcagagcgctgagcaaagatgccaatcagagaaagagaaattcatttgcgatgttaattaacaagcggctaattaaaacggcactttgagtgctaatcaatcgccttattaagttacagccatcactggaacaaattgaaacctccccgccccgttttctgcctttggtgcaggcggggccgcgttcccagataccgtgagaggccttggggcgcggaggttgggggcagcctcggtcagctttctcagtctctcccaggtctacagaatacgccactggacaagtgcctaagcagcgacttctggtccagacacaccgcccggggagtaagtagttgcgtcgaagaacaactcattcagcagcagttaacaccgacgtttcctcctagaaagagctcccgcaaagcggggggatgtgacctgtgggcccccagcaggggtaggaggcagttcagcccgagagggggcgctctagggcctggatcctgcatccctatttcctggaacacacccaacgcctcattctgaaaaccctgcttaggccctggccctggtgccgctcagcaaccaggaaagagctggacctgccttcaggcagcaagaacaggactgccagcctcctgtggctctgtctcccgaggctccatgagaaggggatgggggtgcaagaagggaagagtgaggtggtgtgctgggcgtcggggacgaggacgcacgccagccaagacgtgcctcccacccagcccacgcgcgcttccccacccccctggccctccaaaatcggtaagagaattaagatttcgaatccctattttgaggagccttccgcatttcctaattgttaaattcctgcttttcaccaaattcccgggggagaaacatttggcaataagaagggactgtgaatttaaatgctaattgagtgggtcctttttccgcagctccacctgcctggcagcctctgttgaaaccaaacacactcggagcgcccagtgcaacattcttggggtgccgagtagaagcgcagtaaagagagaccctagcggactcctgtctggtttgctttttaccgactcttacagaaaaaaagagaatgccattggaagaagctcttttgcgtggtgggcgatgtgtgggtgggggacttgtggcatggcccacggtgttgtttctgtgcctgcgatgacacacgtatgtcttgagctgtgggctcgccttcctggaggtgcgcccgaccgcatctgctggtgggtctgagcgtgcttggggtgtcccaggagaactgagagaacggctcccacgtgcaaagttccaaagcattaatattttcatcatattatcattattcaatataataatatttgttcggttagcggcactaattaggccacattaaaaccgtagtgtgtccctaatggtgcgtaatgtgctcacactcacatttttctctctgaggatgggcggctgcaggctggtaggggaggagagacaggcaagcggcgggctggattagggcgtgacgccccccaccacgcacacaaacatacacagcccactggatgtctgccgggtgggagccgcaatctccgcgcggtcgatggggccctccgctgcgcactcggccctgcgccgagcaccctgcagcctcctcccgcgacacggcgctttgaactcggcggattgattttgcttcccttcccccttttgtgtgtgtttgcgttcaattggttaggtttttaagatttgggagggctggtgtgaaagaattaaaatactcttaactggagcccctccgccgagaactggaggtcccgcctcctagttcggcgctttcaggaccctcttcccagagggaatttctttcagaaattccagggtgggcttgtaaaagacgcttccgcagagcaggtcccgtcagggtctttttcctgttcctggtgccagcggtcggcccgggcgccccgcagacctcggcgaggtagatgttaagctcggagagtgcccctcccgcaggcgccgtggcgagatcactctgaatatgtaacatatttgtaacgtgcgccgaggtgtgatgtgtgtgctgaaatagggggatgggggaattcgaagccggattgggaaggcgggggggaggcgcacagaactcacaatgtacttcgcaatctaacaatctgaacattcatttattaaaagctgctgcgtgacatttacactgagccaccagtctctgcctctaatccgggcgaaaacgattgtactgccgagttatggctgcagcgtatggggacgctgctgtccgcggccggacagagcccatcagctacaacgcggaaggcctctgcacccccttgggggcgggaggaaagtactgccagtcctgcctgggggccgagggtaacaagcaccgagcctctcgctccacgcagggccagctgcccagctcagcgaagctcttgtgatctggtgcgtgtctctcgctcttccctccccatcaaagaagtaaactttctacctactccccctaatccgatcgtttagagctgctgttttccttttgtcagattcctcctccccgatcagtctgagtacacgatcagaactgctcagagagcaggaagcacattgatttcagcttgttctgtccacagacaggccctgacaaggttgttagaacagccggagaggtctatacaatcacttaattaccaaaactgtcagtcaggcgggacgcggatccgcgtcccgggctgcgctaggcattccagcactgggccgcgcgcgtgattgatcggtgctgatagcaccgcaaaataattacggcgaattttctgatgtgtgattttatcccaagttcatgcttcagagaggtaatcggagaatgagaagggtcagtgccatttcggattacctggaatctgcgagaaagggtaaaatgggggaaggagctccgaggaaaacgggagagatgggggtgcagagagagagggaagaagaaagcgagttatggattgctggagggactgcaagcaattcgtcaaactgtgcaagtgatttccttcagagccagcatatggcagattgattttgtccaacgtcggttttagccacatttaaaatgatccagcggttattactgcgattggcttaggaactgacaggcagttttaggcgcaaggagtatagatcctgtttaccggagatgtgttcgtaactgctgtcaaatacagttaagtaaatatcattagcgaagagctctgttaagagaaatgccaatccaataaatatgcttttcctccccgccctccgcatggctgcctgcgcttcctccagaggttctccttcctgctcctttgctgcttgggtcagacgtcccaggcatggtgctgactcccgccaccttggagccccgagctgagcctcgggcagaagatgacaggccagccgtggggcaaggaggccgcggaaacgcggaacggcttcggggagacggaagcgcccaatgagattcaccctgcagcccgggtccagcccaccttcctcggagattgccgcggccctcgaacccgggcctaggtcttcatgtcccggcggccagaggacgttgcggggaccactggggagctgccctcagtcagctctctgccccacgccggaggtcctggcgcggcttctttcccgaactagactggcgactctgggccaggccccaaggaccgccccggcctctccggctttgcggggagaatctgaggaaccgagtccaagatagccgacctaggctgttttcacccagaccctgcgtccccgacccgctggagtgaatctgacactgccaggttctctctcatggcatggagtgaatgaagagggccatagatccccttacccagcacagtccctcggcaggccctggaaatccacagggagcagaagcacagtattttctgaaccgctccctctccctgggcctgtggccatttgaaggcagagctctgtgcctccaagacagtaggttttcggtcaagtttggagcctggggccccaacacatttacacagggttggcatcaccgtttccttggactaaaggcaggctcctatatcctttttaaaggaacagaaggaaggaaaaggaaaccaacacgggttatgttcagatagtaggcctatggcaattcttcacagccatagagtcctaatccgagtatcttcccagagaggaaaaacccaaaaaacttttaaaagggggaaagctgggtagatcatagcacccattcttcatgcctaggcagaaaaactaacccagagggagcaaaggggtaagaaatatgaagagatcccctctgggagctgaggagcaccctagtttataatttggtcaaaggagaaagtcactggcctcctcctttgatagaggcgtgtcatctatcttcccagggaacatgatggttcacaaatgaagaggctagccctcctgcagcttttttctacagagtgtaaaacacacaccgccttcatcagtgtttgggatgtaaagaaccctgtctatttaaaagagatactgcatttttaaagtcaaacagtaccaatgtatgtggcgaatcaagtaggtaaacaacttacatatggttgctgcacttgaaggaaccatccattctcatgcacagcaaattgaagaaacaatggcactaatgagccttgcaaaatgcaactgtgaataatgaaagacaacactgcattttgcaacagaaagaataaaggtgaaataatcagctagcaaagaggaaaagaaagcgagcaatgattaaatgatcaaaagctggcagagtgaattcaatgtcactgccagacgcagccatctacccacaagtgaaagttaggtttcaagcacagtgtaattatagctggggttgtcagtttgacattaatgcagccagcagaaatttcctaattggcctcagaggagaaagtgaaccagaaaatatattaacattttaaaaaagcatattttgcctaatcctttcactttcgaacaatatttgaagaccaaaatgccccaggcataagaatttaaatgagcaattttgtttttgaaggaaacggccaatgagacagaaaatagactaaagggaaatcattagtggatgagagatactgacaggcttgccttgctgactggctggcctgtcacttgcagtctgtgttctttagttccacgctatgagctaagttgataacatgaaaagacccataaacgtgcagccagaagtcacagcctattatctggaaattcaaatgcaaggggagggggtggcagagaaggcatcggcgaggttgggagggagaggtgtgcatcgagggaggaggaggaggaggaaggggaggagggaaaggaggaggaggaggagaaaagaagccctcattctttggcataaaatcggccatatcagagaacaataataagctattatctgtcataaatgtgctatggactgccaaaaaatgtagtcccgaatcgacaacattgttcgaactgaagatagcaacaaaatgcttaaagttgcggatgtaatttcacatgcgtccgggttgatgtgatatgaccgtatcagggaaacaaagctaagtgcagtcaggatctgttagtacagtggcttttgatggaacagctgaggcacacatcgcccgtggcatggactccggggccgaacgctcacgaccaagacttttgcccttttgaaatgaaatagaaataggggagctgcaggaaaaccgaatcgcgcttagggtcaggagcaagacaggagctttcagcgaagatctgaacattcagaactggaacgggtaattagcagatagccaggaaaaaataaataaataaataaaaaagcctggatggacctctgtaaacaatcattaagaaaaataaaaatgaaccttcttattagcctgccttggaggtagtcagaaacaaacaaccaaagcaagagaggatgaagatttaaataaaataattatgtgcatcattaaaataatcatatatgtttgtacagacacgtatacaccaaggaacgtaatgggggctcctcgcacagtcccaggagatgcagga

SEQ ID NO: 126 - DNA, 9739 bp, Artificial Sequence
  chemically treated genomic DNA (Homo sapiens)
acggaagtatagaaatgtatttaataaatatgtaatagaaggataattaatttaatattaaagtgattagagagttaatgttagggttttatgggtatgttgatattttagaatagagaggattgaaggttagagattttgggtaatttgtatattaagaacgtttttaagttatcggggggaaagatagagttttttttgttttatataaaggggtagatttaaaattatagttttttaaaatttttaaaaatttttgtaagatttgaagagagttttgttttaaattttagtgtatataatataaatatatattattaatatttataataagagattggaattaaagtgtatattattttttaaagttttttaaaattgtttttaattataaaaaggtaaattaaaaattttttttatgttatagtagtttaaaaggtaaataatggaagtagaaaggagatgtatatttgttgaaatttgttatgtattaggtattttatataatttatttttatttgatttttataataattggtaaggtgtgtgttgtaggatattaagaggttatagattttaggaggttaagaaatgatttaaaattttatatttaatagttggtatagtaaagatttgaagttaagaatatttgtttttaaaaattagtcgtatattatgataatatattttaaataaagatgtataaaaagtatttggttttttatagatattatataaaatatgggataatattagtgatatatttaaatttagatattagaaagaagttttttttaatttattttgtaattgtaatttagttgtttattttataggtttttatagtaataattaaatatttttttttttgttttatatgtgtttttaaattgttattaaagatttttggttagtagtttttatattttttggcgttttgttgttaatgttcggtaaatatgggtagttaaggaaaatgtagatggtgttatggaatataaattacgataatatatggtatatatttagttttaataaagtgcgttttttaatttttgggtgtcgttttattatttttttataagattatttatttttagggaaggtttagtttttaaaattagggtaataggtttatatgtgttatatggttatttagatgtatagattatgtgttttaatatttttaagtaagtgtatttagtatatgttttttagtattattatgtgtatttatgaattgttttgtttagatggtaagtttttcgaggataagtgttatgtttgaaattttattttattaattgtgtatggtagagtaataatgttatttattttgtatatagagatatataatttataaattgtttttttaggtaaattttttaattatattgttatattgtgataattgttatattttttagatgaggtttatataggttaagtaattagttagaattataaattaataggtaatgttttttttttgtttataagagaaagttttttttgttttgtaatattttattgttttttttttttaaggtttttattataaaggttaatgtttattggttttttaataaaagtaattattatttagtatttagtatatatatgtaaggtattgttttaagggttttataaatattaatttatttaatttttttaattattttatgagatagatattatttttatttatattttatagataaggaaattgagggatagagagattaatttgtttaaaattagaggattggtaaatagtagtagtgaaatttgaatttagtagtgaagtatagttttatagtgtgtgtttttaaatatatattattttgtttgaataagagtttataaagatttttatttaggatatatgaggagttgtttagtaagaaaagaagtatgtttatttttttttatttgatgtatttgattatattttaaaatttttttttatgttaatagaatttcgcgtattatattaaatttttttgtatcgaaggtatatgtaatggttattttgattgatatgtaaaatatttaaaataaaatatttcgagattcgaggattttttgttttatgaattagatattaaaaaaaaaattgtttaggtattagaagtgttatatatttatatttgtaagttttttttgggatttttagattttttatataagatttttttttgtttgaaatattttagtgtttatttaatgtttgagtttgaaaattatttaattttttttaatttttttatttttagttattttgtttttaggtatagggtagggtaagtatttgtttttaatatgatgtttaatattttttatgtttttattttcgttattttgaaaatatgttagtaaatatttaaatatattgtaaagatttaaaatttggggtgtgtatacgtatattaataggagttatgaattatgtatattgtaggtttatataaattagattttgaagaataagtattatagtaattaagcgggttataataagatattttatgtgaaatgtaaaaattattttgaataaattatttgtaagttaatatttttattagaatgatatatttattatttttgggtttgtgatattgttttaatgtattttggttaattgttttaatggtatattaagaaattattttaggtttttttttttcgttggaatttgtagatttttattttcgtttgaattaaaataatataatattaaaaataattttttattttttaatgtataatattatttttttttgtttagaaatatttaattaaagtaggatataattttagtaattatttttatatagaatgatttttaaattaatagttagttgtatgattaaaaattgggagattgataattaaaataattttaaatgttttgtttatgtgatgaaaatgagtgattttttaatttttttatatatattaaattgattttatagattttttgtattggtgtttaatatagttaagtgtttgaggttatgtaaaataaataattttgagattttattgtaaatgtttgtaatttatgatgtaaattgatttgtgaagaaaaaataggattttatgtcgttgaagttaaagaggtattttttagaaattaaaatagtttcgaaatttgagtattgtattatattaaagtattattatttgaggatttaaaaaagttataaatttggggaaaaatttaaaatagatgtatattagtttagttttaagtaaaggtatcgattttattattttattgtgttttttgtattatagggtttttaatattaatgatgttttaaataattttttttaatttagttttttttagttattgattttgtaattcgggaaggttttgtatgtttaaaagatttggggagtagaggatgggggtgttttttattaattatattaggattattgagtttcgatttaaattataagtatgttgggttttatttaaatttaaagtgaattttttagatttttttttgggatggttcggggaattacgagtttggaatttttgtttatatatcgaggcgtttgttttagagtttggatattggtatttcgggagagtaggttttgcgggagtttggattcgaagggcgagattttatagggttaaggaaagcggtttttgtttttcgttagttttgggggagtagacgtaagaggaggtaagggcgtcgcgagtttttcggatgtattggttttataggtcgtgttcgagtggagtattgcgaatggggttaagaaattttggtttttttcgtcggatttggttgttttcgcgggttttttcgtttatcgcgttttcgtcgcggttcgattttcgcgggttttcgcgtcgaatttatttggtttttatcgtacgggatattttcgatttatttacgtcgcgttattgagtttttgtatcgatattcggcgttttcgttagtagggtttggacgtatcgttttttttgatttcgggtttttttcgcgtttcgttgtttggggtagattggtttcgagagggagttattattttttttgttttagggtttttagggttcgaattcgtgttgggatttgggttaggattagggtttggagtttggagtttgtttgttaggattttcggtttcggcgtcgattggagttcgttggaggttataggattacggcggatggtttggttgttttagggcgtattatgttcgtaggtagatgtttattattaaaaattatcgacgtttattaattaggagattcgtaaggtttgcgtattgaatacggtttaaattttgtttagtggtttttgaaagttaaaagaaagaaatttatcgtttacgtttatgttgaggaatagttttgaatacgagttaagatttgggagagggttaagtgggggtggtggggaatattgttggaggatgtggggttttggtaggggttttacgtattttttagtacgagggtggggggttttaggggacgtttaggatttttttagtttttgcggaaggtttcgttattataagagttcgcgcgggaaggaaagtttttgttttggatatggttagggtcgagtttttaaagtttttaattatttttatataggtagtatttttgggttttattagtgggattttttttagaagggggttacgatatggggagagagagttttttattatttttaaggttaggttttttttaaattcgattttggtttttattttttaaatttaattaatgaagaagttgttttagttaattttaaataggagtgttagatggggaattttttttttatagtgttttggtttgttcgtttttgcggtttttttttcgtttcgaagttagtatttgtttcgttttagagagggttaacgaattgggattgattgtcgattatgttatattaaatttaggttgatttcgtttcgtaggatttttttttttttttttttaaaagtgtttttagataaagattggaattatagtaaaacgaataacgagagtttattttggggaaggaagttattttattttatgttattttattttttatttgtttttttattaatttggtataattttgtttttatgttgggtggataaaatggagggggtcggcggaaatgcgtttagcgttaacgatagttatagagttattttttttattgttttttgattgcggtacgtaagagtagaggtaagcgtttttttaagttggtatattcgagagagtgatacgtattaattaaaagggaaagattatttcggatattttaatagtaataggaataaagatgattcgaattttattaaatgaaacgatatttttatttaattgatcgtaaagtgtttttaattaataatttggtatttatttaaaaggtttaatagaattggaggcgatatattttgtattgataatacgttatgagataatattttttgtttaaaataatttaatatattagaaaaaaatatgttaaatataaataattttgtttttatggagaataaatagttataaagtttaatcgtatattaaagtttagttagaagagtttttttttttttttgtaaattagaaggtaaaataaaaataaaaataaaattttataaatttaggtttgttagcgaattgggatatagattggtttagtttaaggtattttagtttaaatagttatatgaattgaaataaataattaaaagaaaaaaaaaaataaaaaagaaataaataaataaaaaaaaaaggttatttgaatagatatatttttgtgagataaaatgtaaatgttgaaagttagtttatatattatagttaaaataaattttgttcgtgtgtattaatatattttatataaatttagtgtttgtatttagttgggtgttatttaaggtgaatttgacgggatagagagggggaaataaattattgtttttaaataggattttaggaaattaataagaaggaatataagaaaaggggaatggtgggaattaatattgattgagcgtttattgtgtttggtatagcgaggcgttgtatttttattattttatttggtggttttgtttttttttttttttttttatatattttgtttatttttgtttttttaggataatgagtgtaattttttttttttttgattttttttttttgttttttaggattaaagatagggtaaatatatatatatatatatatatatatatatatatatatatatggtaaatatatgatatatatatatggatatatatatattaatttttagatatttttggtattgttttttatagtgaagatgaaaatggagtgagtgtatgggagataagggggtgggaggagatatattattaatggaatataagtaatatgtaaatcggaatttattgttagtagtttagatagttttgttataataattttttagagaaattattgtttgtggtatttttttgtgttaatattattttttttttttttcgttttaatattttttttttttttgtttttttatatatggtgggtttaaatttaaagtatttgatttaacgtaaaaggaggttcgttttttttattaaatttttcgtgttaacgtgaatttcgtagaaaaaggttagttttaaaatttgtgaattttttagttgcgtattttttttattttagttttttaaataagtatattttttttttttgttttgtttttttagcgtatttttaaaaatatatatttaagttggtaattttttttagtttttcgagaatcgtttgggttgtttttttatatttttaaatgtataaaatattttaattttaaaatttgtttttgttttttggttttttaattttagtttttgttaaatagtagttaagaaataagttttttttttttttttttttttcgtttgtttttcgatttttttgtttgtttatttttttattgttaataagatttttttttttatgtaagagtttatcgttgtagttttgcggtgagttaaatttcgcggttttagtatttttttgtttagtttttttttagatttttttaaattcgtttttataaaatttaattttaggttttcgagtaggaaaacgggtaggagttacggagtttgcgtgtttcgtgagatttttggttttgcgtggagtttggtttttcgagtttaagatgcgataggggacgagggatggttagtgaggcgggaagagggtcggttttcgaggttttaaaggggtaacggagaagtagcggggcgcggagggcgtgtaggttgagtgtcgcgggataggcgcgatattggtgttggcgttggcgttatagatttagggttgcggcgtgttttttggtttttagtttgagatcggcgatgttggagtttttgttggtggttttggcggttgttgcggtcgttattatcgaggcggcggaagtcgaattcgcggttagcgtggcgagcggtagttcgaagggcggtgttgggaatattatgtagggcgcgtgcgcggttaggtgcggatgtaggtggtggtgcgcgtgcgttatagcgttgtttagttgtagttgcgtttgaatttgaaaggataagggcgttacgttgtaatgattattttagggtgataatagaatagaaatagagtattaacggcgtttagtttggttagagagagagttgggttgtgtttgggtacggggagagggtatttggttgtgtattttgtttcgatagtgatttttttagtttgttgttgaatttggggttttatatggatattttagtgttttttgggttttcgaaattcgtttagggtaggtttattttttcggatttcgggaatttttttttgtaggaatgtggtcgttttttttgggaattgggttgaaatggtatattggaaagattgcgggtgaggatttttattttttttttttgatgttgttatgtattttttattttattattaaaataacggagtattaataagtaaattacgtaattttttaatgttatttagggaagttattttatttttattataataggtataattgtgagtcggtatttttaatttttattgttataataattatttagggatttcgttaaaatttagattttgattcgtaaggtttaggttggggtttgagattttgaatttttaataattttttagacggtgttgttgttgttggtttaaagattattttttgagtagtaaaggtttttttttaaagttatttttttttttttttttagttatttttttttgtttttaaagttaagtattaggatgttagagttttgtggtattaagagagttaagatttttttaatatcgatttttaatttatggttatatttatttgttttttcggtttaagttattggagattgagagttaatttatgatattataggtatgttaagtaggggttttggttgaggatagggaaggttagatattggttgggaaaggatttcgtttttaggtttggaaagtggggagtttagagtattgggattttttaggattaaattattgttgtaggttgtttttttaaaatgtatttttaaaggtttttttatggttaagggattgtaaaggtagggtagttttgggaagattaagatttttttttttattagagatgaagttttgtttgtagaaatagatttaaaaataaaagaacgaaaaaataaaagtatgagttgggagtatttgtgtttattttttttttgttagagttatttaatgtgattaagaggtagaaaatatttagaaaagtatttagagggttgttttagaaatattttaggattaatttttgtattggatttgataaaattttaattaaaaggttttttttttttttttttttaagggtaatttttagtgtatttttaaaggattagttattgtttttaggtttttttagggatttttatgaggatagaagggattaggtatttaggtttttaatatcgtataggtttttaaagggtagtgggtttattatattattttaaaatgattttttaattatgtagatattgatatttgggtttagagataggtgatgtttaatagtttaagtaaatatttaggtatttttatatttaaaaatagtttgaaattaggttgtatttgtttgttgaaatggtatttttaaagtatttacgttgatataaggtgcgattttataagttttaaattggttggcggtttttatgagaatatttgtaaaaagtataagagaaaaataatgtgaggttaacgtttgtagtattttttagggttttaaagggtataagatagaacgaatttttttgaaaatggattattatttttttaaattgtatttaaaatttaaataaatgtaatttatttttaaattttaggattttattaatagtttttgaagattattaagttaagaattattgttatttttgaggtttttttttttttgttattgtaatagtaatatttattatttttttttttgtttagattattaaatgttttttgtataagaagtatatttttatggagttgatttttttgttttttatatttagtttttcgattttgaaattaaatttataggttggagggggaaaaaaaataaaatttagatgttatgattaaaaatttttttaaattataaaagtataaagagaaaagagtcgtg

SEQ ID NO: 127 - DNA, 9739 bp, Artificial Sequence
  chemically treated genomic DNA (Homo sapiens)
tacgatttttttttttttgtatttttgtaatttaaaaaaatttttagttataatatttaggttttattttttttttttttttaatttataggtttggttttaaaatcgaagagttaaatgtagaaaataagaaaattaattttataaaggtatgttttttatataaggaatatttgatagtttgagtaaagagagaagtagtgaatattattattataatgatagaaaaaaaggaattttaaaaatgataatagtttttgatttaataatttttaaaggttgttaatggagttttaaagtttgggagtaagttatatttatttaaattttggatgtagtttagaaagataatagtttatttttaaaggaattcgttttgttttgtattttttggaattttgaaaaatgttataaacgttaattttatattattttttttttgtattttttataggtgtttttataggggtcgttagttagtttgaagtttgtagagtcgtattttatgttaacgtaggtgttttaaggatgttattttagtaggtaagtatagtttagttttaagttgtttttaaatatgaaaatatttgaatgtttgtttgaattgttgaatattatttgtttttgagtttagatgttaatgtttgtatagttggagaattattttgagatgatatagtggatttattattttttaaaaatttatacggtattaaaggtttgaatgtttagttttttttgtttttatgggaatttttgaaggggtttgggggtagtaattggttttttaaaaatatattaaagattgtttttagagagagaggaaggaaaagttttttgattaagattttgttaaatttaatatagaggttagttttaaggtatttttaaggtaattttttagatatttttttaggtattttttattttttagttatattaaataattttgatagaagaaaaataaatataagtatttttagtttatatttttgttttttcgtttttttgtttttaaatttgtttttgtaaataaagttttatttttggtaaagagagaagttttggtttttttagggttgttttgtttttgtaattttttagttataaagaaatttttaagagtatattttaaaaggatagtttgtagtaatgatttaattttgggaaattttagtgttttgaattttttattttttaagtttgagggcgaaatttttttttaattagtgtttgattttttttatttttagttaggatttttgtttggtatgtttgtgatgttatgaattagtttttagtttttagtgatttggatcggggagatagataggtgtgattatgaattgagagtcggtgttagggagattttagtttttttggtgttataggattttggtattttgatgtttggttttggaaataagagagaatgattgaagaaagagggaggggtgattttaaaaggagatttttattatttaaaaggtaatttttgggttagtagtaataatatcgtttgggagattgttagaaatttagaattttaggttttaatttagattttgcgaattagaatttgaattttaacgagatttttgggtaattgttatggtaataaaggttagaagtatcgatttataattgtgtttattgtggtgaagatggagtaatttttttgaatgatattaaaaagttgcgtagtttgtttgttgatatttcgttgttttggtagtggggtaagagatgtatggtagtattaagagaagagggtaagggtttttattcgtagtttttttaatatattattttagtttagtttttaggggagacggttatatttttgtagaagggggttttcggggttcggggaaataagtttattttaagcgagtttcggagatttaggggatattggagtatttatgtggaattttagatttagtaataggttgagaaggttattgtcggaataagatgtatagttaaatgtttttttttcgtgtttaaatataatttaattttttttttggttaagttggacgtcgttaatgttttgtttttattttgttgttattttaggatagttattgtaacgtgacgtttttgtttttttaggtttaggcgtagttgtagttggatagcgttgtggcgtacgcgtattattatttgtattcgtatttggtcgcgtacgcgttttatatgatgtttttagtatcgtttttcggattgtcgttcgttacgttggtcgcggattcggttttcgtcgtttcggtagtggcggtcgtagtagtcgttaagattattagtaagaattttagtatcgtcgattttagattgaaagttaaaaagtacgtcgtagttttgggtttgtgacgttaacgttagtattaatgtcgcgtttgtttcgcggtatttagtttgtacgtttttcgcgtttcgttgttttttcgttatttttttgagatttcgggagtcggtttttttttcgttttattgattatttttcgttttttatcgtattttggattcggaaagttagattttacgtaggattagggattttacgaggtacgtaggtttcgtggtttttgttcgtttttttattcgagggtttagaattgggttttgtaggagcgggtttgggggagtttggagagagattggataggggagtgttggaatcgcggagtttggtttatcgtaaagttgtaacgatggatttttgtatagaaaaaaaaattttgttaataatgaaaaaatgagtaaataaaaaaatcgaaagataaacgggagagaaaaagaggaagggaatttattttttaattgttatttggtagaagttgaaattggagaattaaggagtaaaaataaattttaaaattaaagtattttatatatttaaaaatatggaaaaataatttagacgattttcgagagattggggggagttattaatttaaatgtgtgtttttaaaaatgcgttaagaaggtaaagtagaaagaagaggtatatttatttaaaaaattaagatgaaaaaagtgcgtagttgggaagtttataggttttgaaattgatttttttttgcgaagtttacgttaatacgagaaatttgatgagagaggcgggtttttttttacgttgaattagatgttttgagtttaaatttattatgtatggaagagtaagaaaagagaaaatattaaaacgaggagagagaaaaataatattaatataaaaaaatgttatagataatgatttttttgagaaattattatggtaaaattgtttggattgttgatagtaaatttcggtttgtatgttatttgtattttattgatggtgtgtttttttttatttttttattttttatgtatttattttatttttatttttattatgaaaaataatattaaaagtatttggaaattgatatatatatatttatatatatatattatatatttgttatatatatatatatatatatatatatatatatatatatatatttgttttgtttttgattttggggaataaaagaaaaaagttagaaagggaaaaaattatatttattgttttaagaagatagaggtgggtagaatatgtggggaaaggaaaaagaaaataagattattaaatgaaataatgaaggtatagcgtttcgttgtgttagatatagtaggcgtttaattagtattagtttttattatttttttttttttgtgtttttttttgttggttttttgaagttttatttgaagatagtggtttatttttttttttttatttcgttaaatttattttaaataatatttagttagatataggtattaggtttgtgtaagatatgttgatatatacgaataaagtttattttgattataatgtgtggattgatttttaatatttgtattttattttataaaggtgtatttatttaagtaattttttttttttgtttgtttgttttttttttgttttttttttttttttggttgtttgttttaatttatgtagttatttaaattgggatattttggattaagttagtttgtattttaattcgttagtaagtttaagtttgtggggttttgtttttgtttttgttttattttttaatttataagaaagaggaaaagtttttttaattgaattttggtatgcggttgagttttgtaattatttgttttttatgaaaataaaattatttatatttgatatatttttttttagtgtattaagttattttaaataaaagatgttattttatgacgtgttgttagtataaaatgtgtcgtttttaattttgttaaattttttaaataagtgttaagttattaattgaagatattttgcgattaattgaatgaaaatatcgttttatttgatggggttcgagttatttttgtttttgttattattaaaatattcgggatagttttttttttttgattaatgcgtattattttttcgaatatattaatttggaaaagcgtttgtttttgtttttacgtgtcgtagttaaggggtagtaagaagggtggttttgtggttgtcgttagcgttgagcgtattttcgtcggttttttttattttatttatttagtatagaaatagggttatattaaattaatgaaagaatagataagaagtaaaataatataggatagagtaatttttttttttaagatggattttcgttattcgttttgttataattttagtttttatttggggatatttttgggaggaaggaaggagggattttgcggagcgaaattaatttgggtttggtatggtataatcgataattagttttagttcgttgattttttttggagcggggtaggtgttgatttcggagcgggaaaagagtcgtaaaggcgggtaggttagggtattgtggagggaggattttttatttgatatttttgtttagggttggttgaagtagtttttttattggttaaatttagaaggtggaagttagaatcgggtttaggaaaagtttggttttgaaaataatgaggagttttttttttttatgtcgtggtttttttttggaagaaattttattagtaaagtttaaaggtgttgtttgtgtggggatagttggagattttgaagattcggttttgattatgtttaaggtaggaattttttttttcgcgcgggtttttgtgatgacgggatttttcgtaaagattgaaagagttttgagcgttttttgggattttttattttcgtgttggagggtgcgtaaaatttttgttaaagttttatattttttagtagtgttttttattatttttatttggtttttttttaggttttagttcgtatttaaagttgttttttagtatagacgtgggcgataggttttttttttttaatttttaaagattattgaataggatttgggtcgtatttagtgcgtaggttttgcgggttttttggttgatgaacgtcggtagtttttaataataaatatttgtttgcgggtatggtacgttttgaagtagttaggttattcgtcgtggttttgtggtttttagcgagttttagtcggcgtcggggtcgggggttttaataggtaggttttaagttttaaattttaattttaatttagattttaatacgggttcggattttggagattttggagtaggggagatggtggttttttttcggggttagtttgttttaagtagcggagcgcgggggaagttcgaggttaaaggaggcggtgcgtttaggttttgttggcggaggcgtcgggtatcggtatagaggtttagtgacgcggcgtgggtgggtcgggaatgtttcgtgcgataggagttaggtgggttcggcgcggagattcgcgggagtcgggtcgcggcgggagcgcggtaggcggagaggttcgcggaggtagttaggttcggcgagaaaggttaaaattttttggttttattcgtagtgttttattcgggtacggtttgtgggattagtgtattcggggagttcgcggcgtttttgtttttttttgcgtttgtttttttaagattaacggaggatagaggtcgttttttttggttttgtggagtttcgtttttcgggtttagattttcgtaaggtttgttttttcggaatgttagtgtttaaattttggggtaggcgtttcggtgtgtgaataagagttttaaattcgtagtttttcgaattattttaagaaggggtttgaggaatttattttaaatttaaataaggtttaatatgtttgtagtttgggtcgaaatttaataattttaatataattaataaaggatatttttattttttgttttttaaattttttgggtatgtaaaattttttcgagttgtaaaattaatgattgggaaaaattgagttaaaagagattgtttaagatattattagtgttaaggattttatgatataagagatatagtaagatagtaagatcggtgtttttgtttggagttgaattgatgtatatttattttgagtttttttttagatttataatttttttgggtttttagatggtaatattttagtataatgtaatgtttaaatttcggaattattttgatttttgaaaaatgtttttttggttttagcgatataggattttgttttttttttataaattagtttatattataaattgtaaatatttgtaataagattttaagattgtttattttatataattttaagtatttgattatgttaaatattagtatagaaaatttgtgaaattagtttaatgtgtgtgagggaattaaaggattatttatttttattatataaataaagtatttaagattgttttgattgttagttttttaatttttagttatataattgattattaatttaagagttattttgtgtaaaaataattattgaggttatattttgttttaattaaatatttttgggtagaagaaaatggtattgtatattgggaagtgggggattgtttttaatattatattattttagtttaaacggaaataaaagtttgtaaattttaacggggaaaaaaggtttgaaatggttttttaatatgttattaaaatagttagttaaaatatattaaagtaatattataaatttagaaataataaatatgttattttaatgagaatgttaatttatagataatttatttaaggtagtttttatattttatatggaatgttttattatgattcgtttgattattgtgatgtttgttttttaaaatttaatttatataggtttgtaatatatataatttataatttttgttgatatacgtatatatattttaaattttaaatttttatagtatgtttggatgtttattagtatgtttttaagatgacgaaaataaaaatataaaaagtgttaaatattatattgaaagtaagtgtttgttttgttttatgtttgaaggtaaagtagttgaaaatgaaaaaattaaaaaggattagataatttttaagtttaggtattgagtgagtattgaaatattttagataaaaaaaaattttgtataagaaatttgaaaattttaagaaagatttatagatgtgagtgtataatatttttgatgtttagataattttttttttggtgtttaatttatgaaataaaaaattttcgagtttcggggtattttgttttgggtattttatatgttagttaaggtaattattatatatgttttcggtgtaggaaagtttagtataatacgcggagttttattggtatgaggaaaggttttagaatataattaaatatattaaatagggaggagtaaatatgtttttttttttgttgaataattttttatatgttttgagtaaggatttttgtagatttttatttaagtagaatagtgtatgtttaagagtatatattgtggagttatgttttattgttggatttaaattttattgttattgtttattagttttttgattttggataagttaatttttttgttttttagtttttttatttgtaaaatgtggataaaaatagtgtttattttatggaatggttaggaggattaaatgagttaatatttgtaaaatttttagaataatgttttgtatatgtatattaagtattaaataataattatttttattaaaaggttaatagatattgatttttgtaataaaaattttaaaagaaaaaaataataaagtgttgtaagataagaaaagtttttttttgtgggtaagaagaaaatattgtttgttagtttgtgattttggttaattgtttagtttgtgtgagttttatttagaagatgtgataattgttataatgtagtagtgtagttaggaggtttatttagaagagtaatttataggttgtgtgtttttatatgtaagatagataatattgttattttgttatgtatagttaataaggtgagattttaggtatggtatttgttttcgaggagtttattatttgggtaaaatagtttataaatatatatgatagtgttaggaagtatgtgttaaatgtatttgtttaaaggtattaggatatataatttgtgtatttgaatggttatataatatatgtgggtttgttgttttggttttggaaattaaattttttttggaaatgagtagttttataaaggaatggtgaagcgatatttagaggttaagaagcgtattttgttaggattaaatgtatattatatgttgtcgtggtttgtgttttatagtattatttgtattttttttggttgtttatgtttatcgagtattagtagtaaaacgttaaaagatataaaggttgttgattaaggatttttaatagtagtttgaaaatatatataaaataaagaaaggaatgtttaattattattatagggatttgtaagatgaataattgagttataattatagagtaaattaagaaggatttttttttaatgtttaaatttaggtatattattaatattgttttatattttatataatatttatgaagagttaagtattttttatatatttttatttgggatgtgttgttatagtatacggttaatttttagaggtagatatttttgattttaaatttttgttatattaattattagatgtaaagttttaggttattttttagttttttaaaatttatgattttttagtgttttgtagtatatattttgttaattattgtgaggattaaataaaaataagttatgtaaggtgtttggtatataataggttttaataaatgtatattttttttttatttttattatttattttttaaattattgtaatatagagaggatttttaatttatttttttgtgattagaagtagttttgaaaaattttgggaggtggtgtgtattttaattttaattttttattgtaagtattgataatgtgtgtttatattgtgtgtattggagtttggaataaagttttttttaaattttgtaaaaatttttagagattttgagggattgtgattttagatttgtttttttgtgtagaatagaaaggattttattttttttttcgataatttgaggacgtttttaatgtgtaggttatttagagtttttgatttttagttttttttattttggaatgttagtatatttatggagttttggtattaattttttagttattttgatattagattgattgtttttttgttgtatatttattgaatatatttttatgttttcgt

SEQ ID NO: 128 - DNA, 4313 bp, Artificial Sequence
  chemically treated genomic DNA (Homo sapiens)
gggtttgattttttgagattcggggaggatttttggtagatgtgtgtttagttagaatatttggtaaggatttttttaatgaagaaaaagtggaggaatttagttttagcgagaagaggtttttttattttgttttagatatatcggatagagggtatattttgattagagttacgtttagtggttaggaggttagtttagtatttttttttttattattttcgttttgggtgggggggtaatttttttgggagtagttgtgggaattgtcgttttttattttagtttagttagtattttgaagtttgtaggggaaggatagtacgtgggatggatattggggaaggagtttcgtaaggttagggtgtaatttttaggttttaggtggtttggtaggttacgttgtttcggagatgtttgttagattttttaagtttatttagggtttggtagtaatttgttggttgtttttgcgggggtttgggttgttgagtacggtgtagttgtttagggttaattagttttagggtgttcgtgttaggttgcggttttttcgtttttttcgtattgagggtatttatggcgtgtaaatgttttcgtatttttagagttgttttatcggatgtttttaggaatttatatatttttataaaaatgtattttaaatgatggataggcgagtttggggtaataacgggtgtttggtgggtagataagagtaaatgggaaggagttcgagggaggagggggaagagaagaggaaatagaatttttagttggatattttgataatagttggaaggaaagtttagaaaagatgaagagagaggaggggagaaattaattggggtttttatttttgtcgttggatttttaattttcgttttaaatgggttttgtttttcggtaaaattagtttaaaggattttaaaataaagaaaacgagatgatcggtttgggagttttttaattagagtagagaagttagaggggggcgggcgatttggttttgaagttttagttgaatagttattttttttttttttggtaaaaaggatttttttagaattttcgaggtttttggattttttttttcgtaaatggagtcgtatattgtattttttcgttttttcggatcgttaagtatgttttatgagggtcgttgttttcgggtggaatgcggtcgtatgtacgcgtttttttgtatacgtatatatacgtatatttataataagtgtttgtaggaggagtgttttgcgcgttagttttgcgtttaagataggaagttgtcgggttatcgagttaaatgggagtgatattatttttttttattagtaaggaaagcggattataaaagtttttttgtatttcggtagtttatttaatattatttatgtattttgtgtaaggaattgtgggatttcgttttacggtaaataatatggaaattttaaaaatagcgatttttttgtgcgtgtttatttacgcgtttcggggtgatttggcggggttgtcgtcgggtgatttatatttttgaatcgcgaagcgatagggaaagcgcgggcgagcgtaggagacgcggtcgggggttttttcgggtttttgggttttcgtattcggagcgggggacgcggtcgttttaaggggaggaggggcggcgggttgtttttgttatttagcggcggtcggagcgttacgtgggcgcgcggcgtcgcggttattggttcgaggtacgtgtttaggagatcggtttgcgacgttattcgagggggttttgttaaaaataagaataaaaatttagagtgaaagtgttttaggttgcgtcgagtggtttggaaattttcgagttcgcgcggaggtcgaggcggcgagggcggcggacggtcggggagcgcgggcggtttagttcggttcggtcgggttttggtttcgcgttttttatttatgcgattcgggtcgcggagttttgcggggttcggcgggggcgcggtcgtacgtcggtggggcgtttcggttcgtagcggggcggcggtcgcgaggagggggtttttatgtgcgtgcgggcggtggcgggcgcgttgatcgcgggcgttcggtattttcgagggtcggttagggcgtgcgggcggggacggtcgggcggcggcggcggtcggagtcggttcgggcgggcgtgagcgtcggggaacgcgttgtttgtatgcgcgtagttttcgtttcgggcggtttaggcggcggcgtcggagttcgaggcggtcggacgcggagaggagcggggagttcgggaggcggttcgcgttttcgtcggattattgcgattgtttagatttcggttgcgcggcgaagtcgaggatttggttttgttgaattttttatcgtttgggcgagcggggcggttcgtggtgtttttaatttagttcgtggatttaaaggtggtttcgcgtcgagcgcggtcggcgatttgtaggattttagttttggtcgcggtcgtcgcgtacgttttcggaagattcggcggggtgggggcgcgggggttttcgtgtgcgtcgcgggagggtcgaaggttgatttggaagggcgttttcggagaattagtgtgggatttattgtgaatagtatggaggagaatgattttaagtttggcgaagtagcggcggcggtggagggatagcggtagtcggaatttagtttcggcggcggttcgggcggcggcggcggtagtagttcgggcgaagcggatatcgggcgtcggcgggttttgatgttgttcgcggttttgtaggcgttcggtaattattagtattcgtatcgtattattaatttttttatcgataatattttgcggttcgagttcggtcggcgaaaggacgcggggatttgttgtgcgggcgcgggaggaggaaggggcggcggagtcggcggcgaaggcggcgcgagcggtgcggagggaggcggcggcgcgggcggttcggagtagtttttgggttcgggttttcgagagtttcggtagaattcgttatgtgcgttcggcgcgggcgggtcgtttttagtcgtcggtagcgatttttcgggtgacggggaaggcggttttaagacgttttcgttgtacggtggcgttaagaaaggcggcgatttcggcggttttttggacgggtcgtttaaggttcgcggtttgggcggcggcgatttgtcggtgagttcggattcggatagttcgtaagtcggcgttaatttgggcgcgtagtttatgttttggtcggcgtgggtttattgtacgcgttattcggatcggttttttttaggtgagttcgcggggattacgcgtttcggttcgtcgcggggaggttcgcggagttggggggcggtgttggcgcgggaatttatcgggaggaaaatatttcgaatttttttcgcgtatacgtataaagatttacgcgatattgtgtgaagttgacgtcggttcgggtagcggttaggagtttagcggtaggattgattcgttagggggtatagattttttaggatcgtagaagggattttttttttttttttgttttttttttttttttttttttttttgttttttttttttgttttttatttcgttttggcgtatttttttttagtttttagtttatgttttttttattgtagttttttttggtgggaacgtggtggttggaagatgggttcggaagtgtatatttttatttttttttttacgattttttaatttaggttaggtcggggacgtatgttttagtttattttagatttgttttattattcggttatttcggttgtgttcggggaagaaaaggcgaggttttttgtcgttttgttttttgtttttcgggtttgcgttgatcggtgggatttaggaggatgtatatagggaaggaggaaaataaaggcgttttttttttttggttttattttgtttgttagcgttagttcgtagtggtggggtttagttttttttttgtatatagcgaggataagggaggtagtcgtttttttcggtatttgttatttttaaatagaaaggatttttttttagggttttttgggggttgttgatgggaaagaggtagtattcgtaggggttttgtagagatgttggatatatttttttatagatttgcgattttaaaaaattaagtttatgtttttgtagaaattattaattgtattttatgcgggtttgcggttgggaatcgttattagaagtggattgtttgatttcgagttggtagcggattttcgttgtttttaaatttttaattattttgcgggggttatttgtttagatt

SEQ ID NO: 129 - DNA, 4313 bp, Artificial Sequence
  chemically treated genomic DNA (Homo sapiens)
gatttgggtaaatgattttcgtaaaatagttgagggtttgggggtagcggggattcgttgttagttcggggttaaatagtttatttttaatggcggtttttagtcgtagattcgtatggaatgtagttgatgatttttataaggatatggatttagttttttaaaatcgtagatttatgaaaaaatatatttagtatttttgtagggtttttgcgaatgttgttttttttttattagtagtttttaggaaattttgagagaaggttttttttatttggggatggtaggtgtcgggagggacggttgttttttttgttttcgttgtgtgtaggaagggggttgagttttattattgcgggttggcgttggtaaataaagtggagttaaggggaaagggcgtttttatttttttttttttttgtgtgtatttttttgagttttatcggttagcgtaggttcgaggggtagaaggtagagcggtaaagggtttcgttttttttttttcgagtatagtcgggataatcggatggtaggataagtttggggtgggttggggtatgcgttttcggtttggtttgagttggaagatcgtagggaaggggatgagagtgtgtattttcgggtttattttttagttattacgtttttattaaaaaaaattatagtgggggagatatgggttaggggttgggaagagatgcgttaaggcggggtggaagatagagaggggagatagggagagaggaaggagagagagagatagagaaagaaagaaggttttttttgcggttttaagaagtttgtattttttagcgaattagttttgtcgttggatttttggtcgttgttcgggtcggcgttagttttatataatgtcgcgtgagtttttgtgcgtgtgcgcgggggaggttcgagatgtttttttttcggtaagttttcgcgttagtatcgttttttagtttcgcgggttttttcgcggcgagtcgggacgcgtggttttcgcgggtttatttgaagaaggtcggttcgagtagcgcgtatagtagatttacgtcggttagagtatgggttgcgcgtttaggttggcgtcggtttgcgagttgttcgagttcgagtttatcgataggtcgtcgtcgtttaagtcgcgggttttgagcgattcgtttagggggtcgtcggggtcgtcgttttttttggcgttatcgtgtagcgagagcgttttggagtcgtttttttcgttattcggagagtcgttgtcggcggttgggagcggttcgttcgcgtcgggcgtatatggcgggttttgtcggggttttcgggagttcgagtttaagagttgtttcgagtcgttcgcgtcgtcgttttttttcgtatcgttcgcgtcgttttcgtcgtcggtttcgtcgttttttttttttttcgcgttcgtatagtaggttttcgcgttttttcgtcggtcgaattcgggtcgtaggatgttgtcgatgaagaagttggtgatgcggtgcgggtgttggtggttgtcgggcgtttgtaggatcgcgggtagtattagagttcgtcggcgttcggtgttcgtttcgttcgggttgttatcgtcgtcgtcgttcgagtcgtcgtcggggttggatttcggttgtcgttgtttttttatcgtcgtcgttgtttcgttaggtttggggttatttttttttatgttgtttatagtaaattttatattggtttttcggggacgtttttttaaattagttttcggttttttcgcggcgtatacggagattttcgcgtttttatttcgtcgagtttttcgagggcgtgcgcggcggtcgcggttagggttgaggttttataagtcgtcggtcgcgttcggcgcggagttatttttgaatttacgaattgggttagaaatattacgagtcgtttcgttcgtttagacgatgagagatttaatagagttaagttttcgatttcgtcgcgtagtcggggtttagatagtcgtagtggttcggcggggacgcgggtcgtttttcgggtttttcgttttttttcgcgttcggtcgtttcgggtttcggcgtcgtcgtttgggtcgttcggggcgagagttgcgcgtatgtaggtagcgcgtttttcggcgtttacgttcgttcgggtcggtttcggtcgtcgtcgtcgttcggtcgttttcgttcgtacgttttagtcggttttcgagggtgtcgggcgttcgcggttagcgcgttcgttatcgttcgtacgtatatggaggtttttttttcgcggtcgtcgtttcgttgcgggtcggggcgttttatcggcgtgcggtcgcgttttcgtcgagtttcgtagagtttcgcggttcgagtcgtatgggtgagagacgcgaggttagggttcggtcgggtcgggttgggtcgttcgcgtttttcggtcgttcgtcgttttcgtcgtttcggttttcgcgcgggttcggaaatttttaggttattcggcgtaatttgagatatttttattttggatttttgtttttatttttaatagagttttttcgagtgacgtcgtaggtcggttttttggatacgtgtttcgggttaatggtcgcggcgtcgcgcgtttacgtgacgtttcggtcgtcgttgggtgataggagtagttcgtcgttttttttttttttaaagcggtcgcgtttttcgtttcgggtgcgggagtttaggaattcggagagattttcgatcgcgttttttgcgttcgttcgcgttttttttgtcgtttcgcggtttaggggtgtgagttattcggcgatagtttcgttaggttatttcggggcgcgtaggtggatacgtataggaagatcgttatttttaagatttttatattgtttatcgtggggcgaaattttataattttttgtataaaatgtataaataatattaaatgagttgtcgagatataaagggatttttgtggttcgttttttttgttgatggagaggaatagtgttatttttatttgattcggtaattcggtagttttttgttttaaacgtagagttggcgcgtaggatattttttttgtagatatttattgtaagtgtgcgtgtgtgtgcgtgtgtagggaggcgcgtgtatacggtcgtattttattcggggatagcgatttttatgaaatatgtttagcgattcgaaagagcgggggaatgtagtatgcggttttatttgcgaagggagaaatttaggagtttcggaggttttaaaggaattttttttgttaaggagaggaggggtgattgtttagttaagattttaaaattaagtcgttcgtttttttttaatttttttattttgattgaggagtttttagatcggttatttcgttttttttgttttaaaattttttaaattaattttgtcggagagtagggtttatttgaaacgagaattaggaatttaacggtaagggtgggagttttagttggtttttttttttttttttttttattttttttagattttttttttagttgttgttagaatgtttaattggaagttttgtttttttttttttttttttttttttttcgggtttttttttatttgtttttgtttatttattaaatattcgttgttattttaggttcgtttgtttattatttaaaatgtatttttatggaaatgtgtgaatttttggaaatattcgatagggtagttttgggggtgcgggagtatttgtacgttatgagtatttttagtgcgggggaggcggggaggtcgtagtttggtacggatattttagggttgattggttttgggtagttgtatcgtgtttagtaatttagattttcgtagaggtagttagtaggttgttgttaggttttgagtgaatttggggagtttggtaagtattttcgaggtagcgtggtttgttaggttatttggggtttgaaggttgtattttggttttgcgaagttttttttttagtgtttattttacgtgttgttttttttttgtaggttttagagtgttggttgggttgggatgagaaacgatagtttttatagttgtttttaggaaaattatttttttatttaggacgggaatggtgggggaggaggtgttgggttggttttttggttattggacgtggttttggttagagtgtgttttttgttcggtgtgtttagggtagggtggggaagttttttttcgttggggttggatttttttattttttttttattggaggagtttttattaaatgttttggttaggtatatatttgttaggggtttttttcgagttttaaaaaattaaattt

SEQ ID NO: 130 - DNA, 16197 bp, Artificial Sequence
  chemically treated genomic DNA (Homo sapiens)
ttttgtaggtggagggggaaagggtttgggggttggtggaggacgtaggagtatgggggagttgtggaaaagacgtggaggtagagttagtaggttttgttaagggataggaggtggttttagagagaaaatgagggattagggatgttttttggggggtggttagttgggtgattgggagaaattgggaaggcgtagattagggtagtaggggtagcgggatcgggggtgttttgaagtgaatacgtgaaattgaaggtgttcgttagttttttagtggaggtatttaggaggtagttggaattggaaggaaatggtgatagtcgttagtatcgtagaggtggcggtggtggtggttatagttggatttttttgggttggtgggaagtgtggaggtgaaggagtagggagtagggggaggtggagaaggaaattttaggtttatatttttattttatttttggttgttatatttttaggaagttttttttgaggttgggatagagggtggggatagtttagtttttttgagagagtttattttcggaggtttgcggtgggagttagggcgcggcggagagggttttttattttttttttagtaagcgggagggaggcgtcgggttgaggttgcgttgagttcgagttcgtcgttcgggtggattcgttttgtttaagcgcggaggggcggaggtttggttgggttgtagcgtggtgcggagtaggacgtcgtttcgtgttatggttattggagacgtacgtttattttttttttcgggttcgtcgattttgttatttttcgttttcggtcgttcgtgggtgttcgttatttagatttttttcgtgttttatgggacgtaagtttttttttagagttcggttttgtaaaagaggtttggagttttcgttatagattttttttttgggttacggaggatgagaagggttatcgagtcgagtcgtaattttgcgtaatttttgatttttttttttttttgtttttacggtattttatcgtttttttttcgttttcgaggttttttagaaaatagcgtagaattgtgtagatgtttaggagatgtgaagatgttggagatgtttaggaggcgacggttacgcgaggagaattgtttttaggtgcgtttttggaacgtacggagatttttcggcggggaaggggtcggggttcgcgttatttagtgtttgtttatcgatttttttttgaagagggggtttagggtttttgttgagggagcggggaggcggtgcgggtttttttcgggtatatatgggtgttcgtttttttttttttttttttttttttcgtacggagagcggagagcggagagcggagagcgatagggaggtagtcgaagatttgaattttgaaaggggagttggcggcgaatggtgaatgagatagttatttaggaagcgagtttagttagttcgggaggcggtggagatttacgttcggaagtaatcggattaggttttagaatgtgatcgtttttcgggtttcgggggagacgttaaggacgcgtaagcggagggcgcggagataattgggagttagagtttttattatttgggttgggaacgtttttgggcgtttcgacggggtggcggtgggggtcgggggaggtttttgagaatcgtgcggttcggggagagtttatttattgttgagtttcgatataggttttgaagttgttgtagtggtttagtttttttttcgttcggttttgcgtagcgcggtgtcgtagagtttaggtcgtgttttcgtttcgtcgtttagagtttattgcggcggtttattggattacgtcggtggggcgatcgtagtttttgatttgtgagttgtaaagagtttcgaggtttatttataaatttgcgtttttagtcgtttttttacgtattcgagttacgtttcgggattcggagagttcggggcgttgggcgttgcggaggaggttcggtttttgtcgttttttttattttttagttcgcgagggatttgggggaagggggagtaagttttcgtttcggaagaaacgttcggaattaaggagtttgatttttggattcgggtgtttgttggatttaggtttttattttcgggtttttcggtcgaattaagggtttcgatagggttcgaggtattcgtatttttaggagataggagttcggttagggcgtattatcgggttttgtttcgagttagaggatgtagtgtagatatttatttttatatcgtttttttatagagtttttttttttttggggcgtcgttgggtatagggtaggtcgttaggaatttttagtaaaattacgttcgtttagaggttcgcggtttttttagagggcgttggggaaagagaggggatttgattttttcgattttcggaggaaaagtgttcggggttttttagggatatagttttggaagtttattttattttagtttaggtcgcggcgaggtggggaggagagttaggagagggggagaggggttttgcgttttgtagaggtttttaattttggaggaaaaagattgggatatatttaagcgagttaaggttcgagttttacgtatttttatttattcggggcggcgtatagttagtttttgtcgggcgtgagtattcgattaagggagtaagtggaatgaaaatttagttgggggggtttttatcgatataattgtttcgtagtcgagtttttggatttttgggagatgtggagagtttggggtcggttttcgtttcgtagagtagattggattgttttaggtgtttggaatgcgtttgtattttgtttttcggattcgcgggagattcgtgtttcgtaagtttttttttttattttagtttgtttttatttatatttcgtcggcgagtgtgttatcgcgaggcgttttttttttcgggaagggagttttttttcgcgtagattcgtattgttttttttttcgttcggttttgttttttaggggtagtttttgtagaaaggagattttttttcgggtcgaagggttattagtttgtagttagtttagtttcggattttgggagatgtttattattttgcggattttgattcgaaattttttttggtcgtttattgcggagagtgttttcgtagagaggtttttaatcgaaggagtttgggttttatattttgtttttaagtttgagtttttagggttgttttgtacgaggtgtagatgaatttgtgtttgtaaataagatagaaaattttaagtgtcgttcgattttttttttttggggaattcgtattttgttttgggagcgtgtttagcgttttagtattaaattttttggtcggggttggtagagtttagagtttcgtttttttttaggcgcggttttttaatatttgtaatttaaatgttgcgtcgcggttaaaattagttttggtagtgcgaatagagaattaaaagtaggtagtgaatgagaatagttcgtattttttttttttggtagacggggaggtgtaaatttcgaggaattttagggtattcgttttaaacgtgggaaattttcgcgcgtatttcgttttttttttttagtttgtgttaatgttttaaatggtgtcgagttgtttaattttgtcgttattatagaggttgttgtgttttaggggattaattgatgtgagatatataaaattttgtaattttataatataaattatagtatagtttttttggagagggttggaatatttgagtgagttttcgagaggaaaagaggagttttttagaggagaaatagagtatttttataatgtgttttaattgagaaattttgttttattgagtttttttttaagtggaattagaagtgttgggatgagagggaaaggatgggagtgcgtttaaaggtggatagtaggtttttatttttggtgggagtgagattggacggtatttttcggaaaggtggtttgggttttggataaggttagaggtaggagtttatgatgtagagatgatatagtgttttttcgcgtgtgagtttacgaaggttattattgaggttttgtgtttgtaaaaggtcgttacgttttatataagtttttatatttaatatagggattgattgggtatagggatttttttatattatatatgtaagtatgtatgttaattaaagatgttcgtgttaaagaaacggttaattttgttgaatttagaggaattgattaattatttaattaagtagaggaaatgtttgaatttaattcgtaatttagttgtttttttatataaaattatatatttttatttatatttgatgaatgaaaaaagaaattagtttatgattttaatttaaatatatgtttttaaaaatatattttttttagtttagttagtatataaattaattgagtttttttggttaagtatgatttagttgtgatatttaagagcgggagtggttgtttagatatttttttttttacgtgaaatttagattaatgagttattatttaataagttgtaggtagtttggttgggttggatttagatggtttgagttaaatttagattgtatttgtttaaaattttgtaaatttttagttacgtaaattttatttttaaaaatgttgggaagttattgtataagagtttaagttatattagtttttttgtgattatttgtagtttttggggaaagaatagaagaaaagaaaatgttagtttttgtgaggtggggttggtgttttaggggttttttttgaatattttgttttttttttaaaggttaaaaggaaggtagtggatatatattagaattttttttatttgtgaatggtcgtaaggttggagaaggtggttagtgtattttaaggtttattatttttttttgtgtttttttttttgttttggtaggtttagttagtttaagttttgggtgttattttttaaatttttttgttaaattaattttatttatttgattggattatttgagaggtgttatttttttttgggttgttgtgattttgagggggtatttttataagagtttaggtattaggtggtgaaatagtttgtgtttttaaatttgttttttttagggttttcgggagattttagagtgtaggtttgtttggggagttttaggggtgggttttgagtggaagtgggtttattttttataggagtttaaattttataggaataagaatagtagtaaaataggataagagagtaggtagggagttgttaaggaaaggcgatttttgggaaggtaggttatttagaataaggtttttttggcgttggagagtcggaagggggagcgggtatagaggatttggtttaggtgtgggggttattagtataagtagagttattttttagatttttttttagaagtagttgttttttagagaaattaggtgagggatagtttttgtatttttatacgttagttttggagatttgtttatttgtttttagtcgttttttttttcgggcgagtttgggttaagtattaagttaggatagaagggcggtttttagtcggtttttggtttattttgtttttttaatatttagggagtttgggtttagtataggcgtttttttagcgatcggggtagaattaggacgtgtaatgcgattgttttttttttttcgtttttcggtagagtttttgttcgcgttaatttatttattaggttttgttcgcgttacgcgcgtttttggtaggtttggggcggggaaaggcgaagcgttgggtacgcgagggtttgtgtattttagtttttacgacgtttttggttttttttaggttcgtcgttgtcgtatttaatttttttttttcgggggttattttgaagaagttttagattttagatttagttttttagatttcgttttcgagttcgttcggtgggtttgtaggtcggttttttttcgtttagaggagagcgtagatacgtaatgttcgttcgttggtttcgttcgttttatttttgtttttcgcgttttttcgtttcggtttttgtttataggtcgggtcggaacgttagttttaggagtcgacggtggttttttgttcgtttcggggaaggtgttgtttttttatcggttttaatttttcgttcggcgtttggggtttggttgcggggttcggtttttagtcgagggcgtagggttggttaggtttgttttggttgaggtggagatttcgtttttagggattgttgggcgtttttgtttcgcgagtaacgagatcgtcgcgagcgaacggtttttattgagtttatttttttaagtgttattacgttaagttagagaagcgaggcgagtggaggggacgtagaggggtcggaaaagttatttttttttggtttcgtttttagataaaaacgggagtttggttcggtattcgggcgttcggtgttttcggggcgttttattgaggttttgtttgtaaaattagcgttcgtgttttgaagcgtacggcgtttggaagttgtttttttgttcgtttttttcgaggtttttttttgtgtagcgagtttgagaaatatggaggatcgtttttcgtaagcgggtggtcgcgggcgtttttcgatttttgggtgaagttagagggaaaacggggttttcgggttagtgttttattttttatttcgggagaaattaatgttcggagagggttcgtttgattcgtatagaaaggtcgattttgagggcggcggtcgttcgggggagaaagcggaggttttgggttcgcgggagcgcggtagtcggggttggtatcgtagaggagagatacgttattgtttcgtatttttagaaagcgcgaggcgtcgttttagttggggtaggcggtcgaggtcggtttttatgcgcgtttttcgaagttttttgaaatattttgcggagtttcgtgtgtatagaatttagtatcgtttagtttttgggtagtttaattttttgtagttttattttagttttttcggttttttgaacggtgattttttttatcgtttttttagagttgtttcgtgtttgggtttattttggggggttcggtattttttagttatttttttttttatttattttttttttttttatttttttttttattttttattttttttttttttaggagagcgatttacgaatttttttttttttagttaattttagggtttagttcgtagattttgcgagggtaggtttttgtttatcggttcgttaggcgttttggaggtgacgttttgttttttagagtttttgttgtagttacgaattggggtttgggtcgtaggaaagtatagggttgaagtttagcgttttggggttatttatattgaggtagttagaggtaaagagttttaagaatttagaaaatattttttaggaagtcgtttaattggtttttatgggataggtggagttattaatttgggatggttttgtaggaattaaagagtttagggttttttttttttttaatattatgtttaggagatttagagtcgttggatttttttttttttgattggtgattattagagtttttagagttgtagaaaattttttttttaaaaaattaagtaagcgttaataagattttttataaatttttattagttttattttttcggggggtaggtagattgtggggtttgattttttgagattcggggaggatttttggtagatgtgtgtttagttagaatatttggtaaggatttttttaatgaagaaaaagtggaggaatttagttttagcgagaagaggtttttttattttgttttagatatatcggatagagggtatattttgattagagttacgtttagtggttaggaggttagtttagtatttttttttttattattttcgttttgggtgggggggtaatttttttgggagtagttgtgggaattgtcgttttttattttagtttagttagtattttgaagtttgtaggggaaggatagtacgtgggatggatattggggaaggagtttcgtaaggttagggtgtaatttttaggttttaggtggtttggtaggttacgttgtttcggagatgtttgttagattttttaagtttatttagggtttggtagtaatttgttggttgtttttgcgggggtttgggttgttgagtacggtgtagttgtttagggttaattagttttagggtgttcgtgttaggttgcggttttttcgtttttttcgtattgagggtatttatggcgtgtaaatgttttcgtatttttagagttgttttatcggatgtttttaggaatttatatatttttataaaaatgtattttaaatgatggataggcgagtttggggtaataacgggtgtttggtgggtagataagagtaaatgggaaggagttcgagggaggagggggaagagaagaggaaatagaatttttagttggatattttgataatagttggaaggaaagtttagaaaagatgaagagagaggaggggagaaattaattggggtttttatttttgtcgttggatttttaattttcgttttaaatgggttttgtttttcggtaaaattagtttaaaggattttaaaataaagaaaacgagatgatcggtttgggagttttttaattagagtagagaagttagaggggggcgggcgatttggttttgaagttttagttgaatagttattttttttttttttggtaaaaaggatttttttagaattttcgaggtttttggattttttttttcgtaaatggagtcgtatattgtattttttcgttttttcggatcgttaagtatgttttatgagggtcgttgttttcgggtggaatgcggtcgtatgtacgcgtttttttgtatacgtatatatacgtatatttataataagtgtttgtaggaggagtgttttgcgcgttagttttgcgtttaagataggaagttgtcgggttatcgagttaaatgggagtgatattatttttttttattagtaaggaaagcggattataaaagtttttttgtatttcggtagtttatttaatattatttatgtattttgtgtaaggaattgtgggatttcgttttacggtaaataatatggaaattttaaaaatagcgatttttttgtgcgtgtttatttacgcgtttcggggtgatttggcggggttgtcgtcgggtgatttatatttttgaatcgcgaagcgatagggaaagcgcgggcgagcgtaggagacgcggtcgggggttttttcgggtttttgggttttcgtattcggagcgggggacgcggtcgttttaaggggaggaggggcggcgggttgtttttgttatttagcggcggtcggagcgttacgtgggcgcgcggcgtcgcggttattggttcgaggtacgtgtttaggagatcggtttgcgacgttattcgagggggttttgttaaaaataagaataaaaatttagagtgaaagtgttttaggttgcgtcgagtggtttggaaattttcgagttcgcgcggaggtcgaggcggcgagggcggcggacggtcggggagcgcgggcggtttagttcggttcggtcgggttttggtttcgcgttttttatttatgcgattcgggtcgcggagttttgcggggttcggcgggggcgcggtcgtacgtcggtggggcgtttcggttcgtagcggggcggcggtcgcgaggagggggtttttatgtgcgtgcgggcggtggcgggcgcgttgatcgcgggcgttcggtattttcgagggtcggttagggcgtgcgggcggggacggtcgggcggcggcggcggtcggagtcggttcgggcgggcgtgagcgtcggggaacgcgttgtttgtatgcgcgtagttttcgtttcgggcggtttaggcggcggcgtcggagttcgaggcggtcggacgcggagaggagcggggagttcgggaggcggttcgcgttttcgtcggattattgcgattgtttagatttcggttgcgcggcgaagtcgaggatttggttttgttgaattttttatcgtttgggcgagcggggcggttcgtggtgtttttaatttagttcgtggatttaaaggtggtttcgcgtcgagcgcggtcggcgatttgtaggattttagttttggtcgcggtcgtcgcgtacgttttcggaagattcggcggggtgggggcgcgggggttttcgtgtgcgtcgcgggagggtcgaaggttgatttggaagggcgttttcggagaattagtgtgggatttattgtgaatagtatggaggagaatgattttaagtttggcgaagtagcggcggcggtggagggatagcggtagtcggaatttagtttcggcggcggttcgggcggcggcggcggtagtagttcgggcgaagcggatatcgggcgtcggcgggttttgatgttgttcgcggttttgtaggcgttcggtaattattagtattcgtatcgtattattaatttttttatcgataatattttgcggttcgagttcggtcggcgaaaggacgcggggatttgttgtgcgggcgcgggaggaggaaggggcggcggagtcggcggcgaaggcggcgcgagcggtgcggagggaggcggcggcgcgggcggttcggagtagtttttgggttcgggttttcgagagtttcggtagaattcgttatgtgcgttcggcgcgggcgggtcgtttttagtcgtcggtagcgatttttcgggtgacggggaaggcggttttaagacgttttcgttgtacggtggcgttaagaaaggcggcgatttcggcggttttttggacgggtcgtttaaggttcgcggtttgggcggcggcgatttgtcggtgagttcggattcggatagttcgtaagtcggcgttaatttgggcgcgtagtttatgttttggtcggcgtgggtttattgtacgcgttattcggatcggttttttttaggtgagttcgcggggattacgcgtttcggttcgtcgcggggaggttcgcggagttggggggcggtgttggcgcgggaatttatcgggaggaaaatatttcgaatttttttcgcgtatacgtataaagatttacgcgatattgtgtgaagttgacgtcggttcgggtagcggttaggagtttagcggtaggattgattcgttagggggtatagattttttaggatcgtagaagggattttttttttttttttgttttttttttttttttttttttttttgttttttttttttgttttttatttcgttttggcgtatttttttttagtttttagtttatgttttttttattgtagttttttttggtgggaacgtggtggttggaagatgggttcggaagtgtatatttttatttttttttttacgattttttaatttaggttaggtcggggacgtatgttttagtttattttagatttgttttattattcggttatttcggttgtgttcggggaagaaaaggcgaggttttttgtcgttttgttttttgtttttcgggtttgcgttgatcggtgggatttaggaggatgtatatagggaaggaggaaaataaaggcgttttttttttttggttttattttgtttgttagcgttagttcgtagtggtggggtttagttttttttttgtatatagcgaggataagggaggtagtcgtttttttcggtatttgttatttttaaatagaaaggatttttttttagggttttttgggggttgttgatgggaaagaggtagtattcgtaggggttttgtagagatgttggatatatttttttatagatttgcgattttaaaaaattaagtttatgtttttgtagaaattattaattgtattttatgcgggtttgcggttgggaatcgttattagaagtggattgtttgatttcgagttggtagcggattttcgttgtttttaaatttttaattattttgcgggggttatttgtttagattatagtaggagtgagttaatttttgggtcgttatttcgtagaattatgcgtgtatatttttgatgaaatttagattttttagttagatttgaaatttgttttattgttttcgttttttttttttgttaatatttaattaatatataggtttataatgtcgggcgaggagattcggtcgggttttgtgcggcgcgggagttcgttgagttagtttttaacggttcgggagttgggtagtatcgttcggttcggtttggttcggtttagtttagtttagtttaagtcgtttatttttatgggttttaaaatatttttgtaagataatgtttttgttttttggttttttcgaaagaaaggggagagagagtttttttggggaggtttgattttgtttttgagatttttaagtatttgttttttgaaagaaaattaagaaaaaaatttaaaaattattattttagggaaatttattgttataaaatggtgtttttttgcgggttgttttatgagtgtattaataagagttttaggattagaagagtttgggggtagagttttggggaagggagtggttggaaatttagatagagatgggttttgggagtaggaggttggggttttttttggagttttgtgttttattttttattatcgtttcggagggttaattttatttttaaatttgtatttatttttattaaagttaggtttattggtttggagttttgggcgtgagtaagataggtattgagtgtgtacgtgtgtatggggtgggtgtttaagtatagggtgtgtgtttttatgggtggtgagtttgtttatgggttgttttaaaagttgtttttggtgtttttgaggtggtgtttatagattttttttttttaggtttgttttttggagagagtataagatttatttggttatgagggagtgtttggtatttattttgggtttttagttcgttttttattttttgttgggtatagttttagtattttagttgatttttttgatttgggtagggtgtagttttagggtttttaaggagatttatattttttttttttttagtgtgttcggtagtttttcggttttgaagggtggggggtttttagttttttttagttatagggatttgtgatgaagttggggttagatgttttttaaagtcgatttatatatcgtataaattgaaatttagaggcgaggttattattttttgttagtggttttgtttttttttttttttatagggaacgttagggggttgagttttttattattaaaaagaaattgatgatatttttttttttttgtttttttttttttgttttttttttatggatagtaggttttagaagttttatagcgattttgtttaaaatttggggtaggtttatagggagaaggttaggttaggtttataagtttgaattttagttgggaggtatagtggggagggttagaagtggatttggataaggttagttgggttattttgttgtttatagtgaagtagttttatgtttggggaaagggtggtgtagttaatatttttgtagagttaggtttttttttttggataggaaatttgggagatttttagtgggtgaaggatttatttattgtgagtagtttagtgtttttttttattaaggagggaagtatatgtattgatttttttttaaaggaatgaatttgggtttatagagtttttggttgggagttatagaggagtttgggtggaggtagatattttgggttttttttgtttttagggtttatttgtttttgatttttatagtttttggtattttgtggggtatttttatgagggtttttattatagtttttagggcgttttttgtttttgtgatcgttttgtagttttttttagtttttttttttttttttttttttagtatttatcgttatttttgtttttgaatagagagttttagaaaggattaggaaaaattaggttagaaagtgtggggagttttgtttatatttaggagttttatttttatttagagattttttatttgtggttagtttgtttattaggtttgttttatagttttatttatattatacgtagtttttttttattaagtggtggaggttcgcgttgagtttatgtttagttcgaagtttagttttatatttggcggtttagtttcgagtggttttgggcgagttattttttttttggggttttagaatttttattcggtgtttattgggtggtatatttttgggtaatttgatttttttttgtttatcgtatttatttaggttttaggtttcgaaaattaaagaagaagaattcgaataaagaggataagcggtcgcgtacggtttttatcgtcgagtagttgtagaggtttaaggtcgagttttagattaataggtatttgacggagtagcggcgttagagtttggcgtaggagttgagttttaacgagttatagattaagatttggttttagaataagcgcgttaagattaagaaggttacgggtaataagaatacgttggtcgtgtattttatggtatagggtttgtataattattttattatagttaaggagggtaagtcggatagcgagtagggcggggggtatggaggttaggttttagttcgcgttaaataatgtaataatttaaaattataaagggttagtgtataaagattatattagtattaatagtgaaaatattgtgtattagttaaggttttgaaatattttatgtatatattatttataggtggtataaaatttaaaatatttgattataaaatatttttttgagttttttgtgtttatgagattatgttaattttatgggttttttttttttttgcgaagggggttgtttagggttttatttttttttaattttttaagttttattatatgatattggatatttttttattattttaaaagaagaaaaaattaaaataatttgttgaagtttaaagattttttattgttgtattttatataattgtgaatcgaataaatagtttttatttggtttatgatttttgttattttgtttgtgttggtttggtgaggatagtaggaggggtttatattttaagtttggattagttattttaaggttttggggagtttaggggatttggtgggagagaggggatttttagggtttttgggttagttttgggatttggttttgggaagtagtttagcgtattttaggtttgttttgggaagtcggttttatgtttattagtagtcgtttaggttcgtagttttattcggttttttttttttatttttttgtatttaatttttttttttttttttttttttttttttttttttttttttttttttttttgttttttttttttttttttttttttttttttttttttttttttttttttttttttttttttttttttttttttttttattaagggtttaatcgtgtgtatatatcgtttgcgtttgtggtttgtgtcgttgtttttagttttatcgtagttttgtcgtaggtttaatttttttgttttgggtattgtttttatgtagaagcgtttcgaggttttggggttaaaggtttggggtgtgtggtttaaagtttaagagcggtggggcgattttttttttggtttggttttaggaattttttgtgattttattagttattatgggtgttagttagggttttagaaatgaggttatggtttattgtttttgggcgggtagaaggttttgtagagggagatggtattatttattttttttttttttttttttttttttttattttttttttttttttttttatttttttttttttttggagtggttgtttttgttatagagaatatttttttaagataaatatgtgtgtttatatatatgtttgtatgtatgtgaatatatatatatatatatatatattaggcgtgtttgagtttatagttttgaaatatgtggttattttgttttttaaaagaatttagaattttttaggatttagaagaaggaagaaagtgtgtaaataattattttttattattattttttgtttttttttgttttttaaaatatatattttatttttgaaggtgtggtatagtgtaaattaaatatatttaatatattttttattaagtatttatatatgtatataaataaatatattatttatatataacgttat

SEQ ID NO: 131 - DNA, 16197 bp, Artificial Sequence
  chemically treated genomic DNA (Homo sapiens)
gtggcgttatatatagataatgtgtttgtttatatatatatataggtatttggtgggaaatatattgaatatatttaatttatattgtattatatttttaaaaataaaatgtatattttaaaaaataagaaaagataaaaagtgatgataagaaatgattatttatatattttttttttttttttagattttggaggattttgagtttttttgaaagataaggtagttatatgttttagaattgtggatttaaatacgtttggtgtgtgtgtgtgtgtgtgtgtgtttatatgtatgtagatatatgtgtaaatatatatatttattttggaagaatgttttttatagtagaagtagttattttaagaaaagaaaaaaataaaggaaaaaaagaaaaaaatagggaagaaaagaaaaaggaaaggaagatagatgatgttatttttttttatagagttttttgttcgtttagaaatagtgagttatggttttatttttgggattttggttggtatttatgatggttggtggagttataggaaatttttggggttaagttaaaaggagggtcgttttatcgtttttgggttttaggttatatattttaggtttttagttttagaatttcgaagcgtttttgtatggaggtagtgtttagggtaggagggttaggtttgcggtaggattgcggtgggattggggatagcgatatagattatagacgtagacgatgtatgtatacggttgggtttttggtgaggaggaggaggaaagagaaggaggaggaggaaggaaggaggaggaggagaagaaaaagaagaagaaaggaggagtaggaggaaggaggaaggaggaagaggaggaaaaaggagaaggaggagggagttaggtgtaggagggtgaggagagggagtcgggtgaggttgcgggtttgggcggttgttggtgagtatggagtcgattttttagagtaggtttggggtacgttgggttgttttttagggttaaattttagaattggtttaaggattttggaagtttttttttttttattaggttttttaagttttttaaggttttgaggtggttggtttaggtttgaggtgtgggttttttttgttgtttttattaagttaatataaataaagtggtagaagttatagattaaataggagttatttattcggtttatagttgtgtgaaatgtagtaataaaaaatttttggattttagtaagttgttttaattttttttttttttggaataataaaaaagtgtttaatgttatataatggagtttaggggattaaaaaaaggtgaaattttaagtagtttttttcgtaaaaaagaaaaaaatttataaaattagtataattttataaatataaaaaatttaaaaaaatattttatagttagatattttggattttatattatttgtaaatgatatatatatagaatattttagaattttagttaatatataatatttttattattaatgttggtataatttttatatattggttttttatgattttaaattattgtattgtttagcgcggattgagatttggtttttatgtttttcgttttattcgttgttcgatttgttttttttggttgtggtggagtggttgtataagttttgtgttatgaggtgtacggttagcgtgtttttgttgttcgtggtttttttgattttggcgcgtttgttttggaattaaattttgatttgtgattcgttgaggtttagtttttgcgttaggttttggcgtcgttgtttcgttaggtatttgttggtttggaattcggttttgagtttttgtagttgttcggcggtaaaggtcgtgcgcggtcgtttgttttttttgttcgggttttttttttttggttttcgagatttgggatttgggtagatacggtggatagagagaagttaggttatttagaggtgtgttatttaataggtatcgggtaaggattttggggttttaagagggaagtgattcgtttaaggttattcgaggttgaatcgttagatgtggggttagatttcggattgggtatgggtttaacgcggatttttattatttggtgagggaggattgcgtgtgatgtaagtgggattatggggtaggtttagtgggtaggttgattataaatgaggggtttttagataaaagtaaaatttttggatgtaagtaaaattttttatattttttggtttggttttttttagttttttttgaggttttttgtttaggaatagggatggcggtaggtgttgagagagaggggaggagagaagattgggaaaggttgtagggcggttatagaagtaggaggcgttttgagggttatgatggggatttttatggggatattttatagggtgttaagggttgtgggaattaggggtaggtgggttttgaggataggaggggtttagagtgtttgtttttatttaagtttttttatgatttttagttaagggttttgtggatttaagtttatttttttaaggaagagttagtgtatgtatttttttttttggtggggaggggtattgagttatttatagtgggtgagttttttatttattggaaattttttaggttttttgtttaggagaggggatttggttttataagggtgttgattgtattattttttttttagatatgggattgttttattgtgggtagtagggtagtttagttgattttgtttaggtttatttttgattttttttattgtgttttttaattgggatttagatttatgaatttgatttggttttttttttgtggatttgttttaggttttggatagggtcgttgtaaggtttttaggatttgttatttatggggaaagggtagagggaggagagtagaaggagggaagtgttattagtttttttttggtgataagaggtttaattttttggcgttttttgtgggggaagaagggggtaaggttattggtagggagtggtgatttcgtttttgggttttaatttgtgcggtgtatgaatcggttttagggagtatttggttttagttttattataggtttttgtggttggagaaggttgggggttttttattttttagggtcggagagttgtcgggtatattgaggagaagaggaatgtggatttttttggaggttttgggattgtattttgtttaggttaggagagttaattagggtgttggggttgtgtttagtaagaggtgggggacgaattggaggtttagggtgaatgttaagtatttttttatggttaagtgagttttgtgttttttttaggagataggtttggagaaagaggatttgtgggtattattttaggagtattaagggtagtttttaaagtaatttataggtaggtttattatttatgagagtatatattttatatttgggtatttattttatgtatacgtatatatttagtgtttgttttgtttacgtttagggttttaggttagtgggtttggttttggtaggggtaggtgtagatttggagatggggttggtttttcggaacggtggtgggggatggggtataaggttttaggagaggttttagttttttgtttttagagtttatttttgtttgggtttttaattatttttttttttagaattttatttttaaatttttttggttttggggtttttgttaatgtatttatgaagtagttcgtaaaaggatattattttatggtaataaatttttttaaaataataatttttaggttttttttttgatttttttttaaaagataaatatttaggagttttagaaatagaattaaatttttttaagaaaatttttttttttttttttttcggagaaattaaagaatagaaatattattttgtagggatattttaaagtttatgaagataggcgatttgggttgggttgagttgggtcgggttaggtcgggtcgggcggtgttgtttagttttcgggtcgttgggggttggtttagcgaattttcgcgtcgtataaagttcggtcgagttttttcgttcggtattgtgagtttgtatgttaattaaatattaataaaggaggaagacgagaataatggagtaaattttagatttagttgagaaatttgaattttattagaaatatgtacgtatagttttgcgggatggcggtttaagggttggtttatttttgttgtgatttgggtaaatgattttcgtaaaatagttgagggtttgggggtagcggggattcgttgttagttcggggttaaatagtttatttttaatggcggtttttagtcgtagattcgtatggaatgtagttgatgatttttataaggatatggatttagttttttaaaatcgtagatttatgaaaaaatatatttagtatttttgtagggtttttgcgaatgttgttttttttttattagtagtttttaggaaattttgagagaaggttttttttatttggggatggtaggtgtcgggagggacggttgttttttttgttttcgttgtgtgtaggaagggggttgagttttattattgcgggttggcgttggtaaataaagtggagttaaggggaaagggcgtttttatttttttttttttttgtgtgtatttttttgagttttatcggttagcgtaggttcgaggggtagaaggtagagcggtaaagggtttcgttttttttttttcgagtatagtcgggataatcggatggtaggataagtttggggtgggttggggtatgcgttttcggtttggtttgagttggaagatcgtagggaaggggatgagagtgtgtattttcgggtttattttttagttattacgtttttattaaaaaaaattatagtgggggagatatgggttaggggttgggaagagatgcgttaaggcggggtggaagatagagaggggagatagggagagaggaaggagagagagagatagagaaagaaagaaggttttttttgcggttttaagaagtttgtattttttagcgaattagttttgtcgttggatttttggtcgttgttcgggtcggcgttagttttatataatgtcgcgtgagtttttgtgcgtgtgcgcgggggaggttcgagatgtttttttttcggtaagttttcgcgttagtatcgttttttagtttcgcgggttttttcgcggcgagtcgggacgcgtggttttcgcgggtttatttgaagaaggtcggttcgagtagcgcgtatagtagatttacgtcggttagagtatgggttgcgcgtttaggttggcgtcggtttgcgagttgttcgagttcgagtttatcgataggtcgtcgtcgtttaagtcgcgggttttgagcgattcgtttagggggtcgtcggggtcgtcgttttttttggcgttatcgtgtagcgagagcgttttggagtcgtttttttcgttattcggagagtcgttgtcggcggttgggagcggttcgttcgcgtcgggcgtatatggcgggttttgtcggggttttcgggagttcgagtttaagagttgtttcgagtcgttcgcgtcgtcgttttttttcgtatcgttcgcgtcgttttcgtcgtcggtttcgtcgttttttttttttttcgcgttcgtatagtaggttttcgcgttttttcgtcggtcgaattcgggtcgtaggatgttgtcgatgaagaagttggtgatgcggtgcgggtgttggtggttgtcgggcgtttgtaggatcgcgggtagtattagagttcgtcggcgttcggtgttcgtttcgttcgggttgttatcgtcgtcgtcgttcgagtcgtcgtcggggttggatttcggttgtcgttgtttttttatcgtcgtcgttgtttcgttaggtttggggttatttttttttatgttgtttatagtaaattttatattggtttttcggggacgtttttttaaattagttttcggttttttcgcggcgtatacggagattttcgcgtttttatttcgtcgagtttttcgagggcgtgcgcggcggtcgcggttagggttgaggttttataagtcgtcggtcgcgttcggcgcggagttatttttgaatttacgaattgggttagaaatattacgagtcgtttcgttcgtttagacgatgagagatttaatagagttaagttttcgatttcgtcgcgtagtcggggtttagatagtcgtagtggttcggcggggacgcgggtcgtttttcgggtttttcgttttttttcgcgttcggtcgtttcgggtttcggcgtcgtcgtttgggtcgttcggggcgagagttgcgcgtatgtaggtagcgcgtttttcggcgtttacgttcgttcgggtcggtttcggtcgtcgtcgtcgttcggtcgttttcgttcgtacgttttagtcggttttcgagggtgtcgggcgttcgcggttagcgcgttcgttatcgttcgtacgtatatggaggtttttttttcgcggtcgtcgtttcgttgcgggtcggggcgttttatcggcgtgcggtcgcgttttcgtcgagtttcgtagagtttcgcggttcgagtcgtatgggtgagagacgcgaggttagggttcggtcgggtcgggttgggtcgttcgcgtttttcggtcgttcgtcgttttcgtcgtttcggttttcgcgcgggttcggaaatttttaggttattcggcgtaatttgagatatttttattttggatttttgtttttatttttaatagagttttttcgagtgacgtcgtaggtcggttttttggatacgtgtttcgggttaatggtcgcggcgtcgcgcgtttacgtgacgtttcggtcgtcgttgggtgataggagtagttcgtcgttttttttttttttaaagcggtcgcgtttttcgtttcgggtgcgggagtttaggaattcggagagattttcgatcgcgttttttgcgttcgttcgcgttttttttgtcgtttcgcggtttaggggtgtgagttattcggcgatagtttcgttaggttatttcggggcgcgtaggtggatacgtataggaagatcgttatttttaagatttttatattgtttatcgtggggcgaaattttataattttttgtataaaatgtataaataatattaaatgagttgtcgagatataaagggatttttgtggttcgttttttttgttgatggagaggaatagtgttatttttatttgattcggtaattcggtagttttttgttttaaacgtagagttggcgcgtaggatattttttttgtagatatttattgtaagtgtgcgtgtgtgtgcgtgtgtagggaggcgcgtgtatacggtcgtattttattcggggatagcgatttttatgaaatatgtttagcgattcgaaagagcgggggaatgtagtatgcggttttatttgcgaagggagaaatttaggagtttcggaggttttaaaggaattttttttgttaaggagaggaggggtgattgtttagttaagattttaaaattaagtcgttcgtttttttttaatttttttattttgattgaggagtttttagatcggttatttcgttttttttgttttaaaattttttaaattaattttgtcggagagtagggtttatttgaaacgagaattaggaatttaacggtaagggtgggagttttagttggtttttttttttttttttttttattttttttagattttttttttagttgttgttagaatgtttaattggaagttttgtttttttttttttttttttttttttttcgggtttttttttatttgtttttgtttatttattaaatattcgttgttattttaggttcgtttgtttattatttaaaatgtatttttatggaaatgtgtgaatttttggaaatattcgatagggtagttttgggggtgcgggagtatttgtacgttatgagtatttttagtgcgggggaggcggggaggtcgtagtttggtacggatattttagggttgattggttttgggtagttgtatcgtgtttagtaatttagattttcgtagaggtagttagtaggttgttgttaggttttgagtgaatttggggagtttggtaagtattttcgaggtagcgtggtttgttaggttatttggggtttgaaggttgtattttggttttgcgaagttttttttttagtgtttattttacgtgttgttttttttttgtaggttttagagtgttggttgggttgggatgagaaacgatagtttttatagttgtttttaggaaaattatttttttatttaggacgggaatggtgggggaggaggtgttgggttggttttttggttattggacgtggttttggttagagtgtgttttttgttcggtgtgtttagggtagggtggggaagttttttttcgttggggttggatttttttattttttttttattggaggagtttttattaaatgttttggttaggtatatatttgttaggggtttttttcgagttttaaaaaattaaattttatagtttatttgtttttcgggaaaatagggttggtgagagtttgtgggaagttttattgacgtttatttggttttttggggggagaattttttgtaattttggaaattttgatgattattagttaggaaagggagggtttaacgattttgggttttttgaatatgatattggggggaggaggggttttgagttttttggtttttgtaaaattattttaggttaatggttttatttgttttatgaaagttaattaggcggttttttgagaagtattttttgaatttttgggattttttgtttttgattgttttagtataaatggttttaagacgttgggttttagttttgtgtttttttgcgatttagattttaattcgtggttgtaatagagattttgggaagtagagcgttatttttagggcgtttggcgggtcggtgggtagagatttgttttcgtagggtttgcgggttgggttttggggttggttggaggaagaggaattcgtgggtcgtttttttggaaaggaggaaggtgagaggtggagggaggaataggagaaagagaaataaatgaagagagagataattagagggtatcgggttttttagagtggatttaaatacgaaataattttgggaaagcggtaagaggggttatcgtttaaagggtcggggaagttgggatggggttgtagaaagttgagttgtttaggggttgggcggtgttgagttttatatatacggaatttcgtaaggtgttttaggaagtttcgagaagcgcgtatgaggatcggtttcggtcgtttgttttagttgggacggcgtttcgcgttttttggggatgcggggtagtggcgtgttttttttttgcgatgttagtttcggttgtcgcgttttcgcgagtttagagttttcgttttttttttcgaacgatcgtcgtttttaaggtcggtttttttgtgcggattagacgagtttttttcggatattagtttttttcgggatggaaagtggggtattgattcgggaatttcgttttttttttagttttatttaggaatcggagagcgttcgcgattattcgtttgcggaggacggttttttatattttttaggttcgttgtataaagaggggtttcggagagggcgagtaggaaagtagtttttagacgtcgtgcgttttaggatacggacgttagttttgtaaataaaattttagtgaagcgtttcggagatatcgggcgttcggatgtcgagttaggttttcgtttttatttgaaaacgaggttagagaagggtgattttttcggtttttttgcgttttttttattcgtttcgtttttttagtttgacgtggtgatatttggaaaaatggatttaatgaaagtcgttcgttcgcggcggtttcgttattcgcggggtagagacgtttaataatttttgagagcgagatttttattttagttaaagtaggtttggttagttttgcgttttcggttgggagtcgagtttcgtagttaagttttaggcgtcgggcggggaattggggtcgataggagagtaatatttttttcggggcgagtagagagttatcgtcggtttttggggttgacgtttcgattcggtttgtagataaaggtcgaaacgaaggggcgcggggagtaggggtggggcgggcggggttaacgggcggatattgcgtgtttgcgtttttttttgggcgaaggaggatcggtttataggtttatcgggcgagttcggggacggggtttgggaggttgggtttagggtttgagatttttttagaataattttcggaaggagggggttaaatgcggtagcggcgggtttgaaaagggttaggagcgtcgtaggaattggggtgtataggttttcgcgtgtttagcgtttcgttttttttcgttttaggtttgttaggggcgcgcgtggcgcgggtagagtttggtgggtgggttggcgcggatagaagttttgtcggggagcggggaggggggggtagtcgtattgtacgttttggttttgtttcgatcgttggagaagcgtttgtgttgagtttaagttttttaggtgttggggaagtagagtgggttaggagtcgattggggatcgtttttttgttttgatttgatatttagtttaggttcgttcggggaggggggcggttgggggtaggtgggtagatttttagagttggcgtgtaaagatgtagaaattgttttttatttggtttttttggaaagtagttgtttttgaaggagaatttgaaggatggttttatttgtgttagtaatttttatatttaaattaggttttttgtgttcgttttttttttcggttttttagcgttaggggagttttattttgggtgatttgtttttttaagaatcgtttttttttggtagttttttgtttgtttttttgttttgttttattgttgtttttatttttataaaatttggatttttgtggaaggtgggtttatttttatttaaggtttatttttgagattttttagatagatttgtattttggagtttttcgggagttttgggaggggtaggtttgggagtatagattgttttattatttaatgtttggatttttatgaaaatgtttttttaaaattatagtaatttagaagaaagtggtattttttaaataatttagttaaataagtaaaattagtttggtaaaggaatttgaagaatggtatttaaggtttgagttggttaagtttattaaaataggaaggaaaatatagaaaaggataatgagttttgaagtatattagttattttttttagttttgcgattatttatagatggaagaaattttagtatgtatttattgttttttttttgatttttggaaagaaaataagatgtttaaaaggaatttttgaaatattagttttattttatagaggttgatattttttttttttttattttttttttaaaggttataagtaattatagagaggttagtgtagtttaaatttttatatagtgattttttagtatttttggaaataggatttgcgtagttagaggtttatagaattttaggtaagtataatttagatttaatttaaattatttggatttagtttagttaaattatttatagtttgttagatgataatttattagtttaggttttacgtgaggaagaaaatatttaaataattattttcgtttttaaatattataattgaattatgtttaattaggagaatttaattagtttatatattggttaagttgggggaaatatatttttaaaaatatatgtttaagttaaagttatgaattgatttttttttttatttattaaatataaataaagatatatagttttatataaaaaggtaattaaattgcgaattaaatttaaatattttttttatttagttaaatgattgattagtttttttgagtttaataaagttggtcgtttttttagtacgagtatttttaattgatatatatgtttatatgtatggtatggggggatttttgtatttaattaatttttgtgttgagtatagaagtttgtgtgaagcgtggcgattttttataagtataaagttttagtagtgattttcgtggatttatacgcggaggggtattgtgttatttttgtattatggatttttgtttttagttttgtttaaggtttaaattattttttcgggggatgtcgtttagttttatttttattagggatggggatttgttgtttatttttggacgtatttttatttttttttttttattttagtatttttggttttatttaaagaaaagtttagtagaataagattttttagttagggtatattatagaagtgttttgttttttttttaaaaaatttttttttttttttcggaaatttatttaaatattttagttttttttagaaaggttgtgttatagtttatgttatggagttgtagggttttgtgtgttttatattagttaattttttaagatataatagtttttgtgatgacggtaaagttgagtaattcgatattatttggagtattaatataggttgggaggaagaaacgggatacgcgcgaagattttttacgtttggagcgaatgttttagaatttttcgggatttatattttttcgtttattaggaaggagaaatgcgagttgtttttatttattgtttgtttttagttttttgttcgtattgttagggttaattttggtcgcggcgtaatatttgggttatagatgttagggggtcgcgtttagggggaagcgggattttgagttttgttagtttcggttagaaagtttggtattaaggcgttgggtacgtttttaggataaagtgcgggttttttaaaagaggaaggtcgggcggtatttagggttttttgttttgtttgtagatataagtttatttgtatttcgtgtaaagtagttttgaaagtttaggtttgaagataaaatgtggagtttaggttttttcgattgaaaatttttttacgaggatatttttcgtagtgggcggttagaaaggatttcggattaagattcgtagagtggtgagtattttttagggttcggggttgaattgattgtaggttggtagtttttcggttcggaggagaattttttttttgtagaaattatttttggaaaataaaatcgagcgaaaagaagggtaatgcgggtttgcgcggaagggagtttttttttcggggaaggaggcgtttcgcggtggtatattcgtcggcgggatgtaggtaggggtagattagggtgagaagggggatttgcggaatacgggtttttcgcgggttcgagggatagggtgtaggcgtattttaggtatttagggtagtttagtttgttttgcggagcgggagtcggttttaggttttttatattttttaggaatttagaagttcgattgcgggatagttgtgtcgatggggatttttttagttggatttttattttatttgtttttttgatcgagtgtttacgttcggtaggagttggttgtgcgtcgtttcgggtgggtggaggtgcgtggggttcgggttttggttcgtttgggtgtgttttagttttttttttttagaattaaaggtttttgtagggcgtagagttttttttttttttttttaatttttttttttatttcgtcgcggtttaagttaagatgaggtgagtttttagggttgtgtttttaggaggtttcgagtatttttttttcgagggtcgaagaaattaggttttttttttttttttagcgttttttgaggaagtcgcgaatttttgagcgagcgtggttttattggggatttttagcgatttgttttgtgtttagcgacgttttaaggggagaggagttttgtggaggggcggtgtgggggtgggtgtttatattatattttttggttcggagtaggattcggtgatgcgttttggtcgagtttttgttttttaggaatgcgggtgtttcgggttttgtcgggatttttggttcgatcggagggttcgggagtgggagtttggatttaataggtattcggatttaggagttagattttttggtttcgaacgtttttttcggagcgaaagtttgttttttttttttttaagtttttcgcgggttgggaggtgaagggagcgatagaagtcgggtttttttcgtagcgtttaacgtttcgggtttttcgggtttcgggacgtggttcgggtgcgtggagggacggttgggggcgtagatttgtgaatgaatttcggagttttttgtagtttatagattagaggttgcgatcgttttatcgacgtggtttaatgagtcgtcgtaataagttttgagcgacgaaacggaggtacggtttggattttgcggtatcgcgttgcgtagggtcggacgggggaggggttgagttattgtagtaattttaaagtttgtgtcggggtttagtaatgggtgggtttttttcgggtcgtacggtttttaagggtttttttcgatttttatcgttatttcgtcggaacgtttagaggcgtttttagtttaagtgatggagattttgatttttagttgttttcgcgtttttcgtttgcgcgtttttggcgtttttttcgggattcggggggcgattatattttgagatttaattcggttattttcgggcgtgggtttttatcgtttttcgggttggttggattcgttttttaagtagttgttttatttattattcgtcgttagttttttttttaaaatttaagttttcggttgtttttttgtcgtttttcgtttttcgtttttcgtttttcgtgcgaggggaggggagggggaggaaggagcggatatttatgtgtgttcgggaggggttcgtatcgttttttcgtttttttagtagaggttttgggttttttttttagagggaaatcggtgagtagatattaagtgacgcgagtttcggtttttttttcgtcgggggattttcgtgcgttttagaagcgtatttggaagtaatttttttcgcgtaatcgtcgttttttaagtatttttagtatttttatattttttaaatatttgtataattttgcgttgttttttggaggatttcggagacggggaggggacgatggggtgtcgtgggggtagggaaggagagaggttaggggttacgtaggattacggttcggttcggtgattttttttatttttcgtggtttagggaggggatttgtagcgagggttttagattttttttgtaaaatcgaattttgggggagggtttgcgttttatgaagtacggggaaggtttaaatgacgaatatttacgagcggtcgggagcggaagatggtaggatcgacgggttcgggagggaagatgggcgtgcgtttttagtgattatggtacgaggcggcgttttgtttcgtattacgttataatttaattaggttttcgttttttcgcgtttgaatagggcgggtttattcgggcggcgagttcgagtttagcgtagttttagttcggcgtttttttttcgtttgttggggaagaggtgggaaatttttttcgtcgcgttttggtttttatcgtaggttttcgagaataaatttttttagggagattgaattgtttttattttttgttttagttttaagagggattttttgaaaatatggtagttaagaatagggtgaaaatgtaagtttgaggtttttttttttatttttttttgttttttgtttttttatttttatattttttattagtttagaggggtttagttgtaattattattatcgttatttttacggtgttgacgattgttattatttttttttagttttagttgttttttggatgtttttattggaaggttgacgagtatttttaattttacgtgtttattttagagtattttcgatttcgttatttttgttgttttgatttgcgtttttttagttttttttagttatttagttggttattttttaggagatatttttgattttttattttttttttagagttattttttgttttttagtaaggtttgttggttttgtttttacgttttttttatagtttttttatatttttgcgttttttattagtttttaagttttttttttttttatttgtaggg

SEQ ID NO: 132 - DNA, 2609 bp, Artificial Sequence
  chemically treated genomic DNA (Homo sapiens)
cgtagattagagatgattatagattttttttagcgcggattaaagggattgaattgaacgttttagtttaatgatttaatttttgttatatttatagggacgcgaatttcgattttataagtaggtgtgtacgtgtatttagatatttatataaagtcgcgtggagggacgaaaagattaattattcgatcgacgaggataggtttgattttttcgattattttagtgtgttagtgtatattttcggttgggtttagcgttttaagaaatttcggaattttagttgttaatttttgtttttttattatgattttttaaagatattttatttgtttatcggggcgaagagaaatgggattaggcgttagggcggtgggattttgtttagggttttgatttcgcgttagggttttagattagtcggttttcgaaggtttttttatttattttatataagaggaaataaagattttttagtttaaggttttagggttgttttttgatttcggttagtttgtaggaagaggaaataataaaataaaggaatcgttaattcgtcgggtattatattttttagttttaattttcgatttcggatcgttagggttattttttttacgttgatttcgttttttttaaatgaaaatacgttaataaaagtatatttcggatataaaatttaagtacgtattttttttggggaggttagagttgaggtgtatttcggaagatgagaattttgtttttatgaattgggtaatatttaggtattgttaggtatttcgatagattttttagatattttttttttttttttttatattttttttttattaaaatagttattgttttgaaatttattagaataacgacgttttaaaaataaaggcgtagtaagtattttttttttcgttgtcgcgggttgaattacggacgttcgcgggtcgtttagtttcgacggttcgtagggggcgcgcgtcgtagtcgtagtatagttcggttatttttagaaagggagtcgaatggagggaagtagggagcgcggagggttcgaggtttgtagataaggagaggcgtattttgggatttgggttttttgttgttataatataatcgtgttattgttggtattgttcgatttaagtgtcggtggtaagcggcgatgtcggggttgggtttttagtaatcgttgtgttttgggttaggttggtcgttttagttatcgggattttttttcggatgtttttagggcgataggtgttgtatttattgacgggatagtcgtatattttcgaataggtagtggagttcgtttttggtaggtattttagttgcgttgatattaaggtcgttatataatagttattagttttttttaagttttagaagtaggttttttttgttttagttatagcggttttagtcgtcgttacgagtttattttttatttttaagcgtatttttttttttttattcgggtttatgttcgttatatagagagaattatatagggggaattatggttttatattttcgaggggatagatatcggtcgtgagataggtattacgtagagttttttggtgattgttcgtaggagcgagattttttttggttttgtagtcggttaggtgtgtgtgtgtgagggtttttagttgattatcgggatgtattgttatttttcggtttggcgggttttgggattttttggttttcgtaggaggttattttaggttttcggaggaggcgtttttagttggcggcgtttttcgtttcgggtttagaggcggatacggtcggtcgcgttttgttggttttttgttcgcgtcgtagcgggttgggagtagttgcgcgatattagatttatagcgttaagacgcgaagcgcgaggaaatcgttgcgtttgatttttttttttttaatttttggatttaggaacgtttttagtttttgcgttttatacgtttagttttggtttttttttcggtttagaagtttttaaggattgaagggttttgtttagggtttcgtatttttgtttgatttttatggtttagaaaagtagggggatatttgaaatgttatttcgggataaatattaataaaaaagtaaatggatttgtgtaggggttagttattaattaattaggtcgtaaggttatttagggtaaatatagtttaggttgggttgggcgagatttttttatggtcgtttttcgatcgaatttttttttttttggtttaggttttttttaggtcgttttggggtaaatatcggacgggaagggggcgtcgttaattttttcgcggggtttggaggttttttcgtttttaagtttcgtagggtagggtcggagtgtttaatatttattttcgttcgaatttcgggtttgcgcgtcgtttttttttgggttcgcggtgttgcgtttgttgttgggtgtgtgtcgttgttttttttcgagtcggtagtttttgttgtgtggtcgaagttttttggaatttttaattggaaattaattttggttttgatagacgtttacgttagaggcgcgttatttatttatatttttcgttttatttcggaggagacgcggcgagaattttgtcgt

SEQ ID NO: 133 - DNA, 2609 bp, Artificial Sequence
  chemically treated genomic DNA (Homo sapiens)
gcgatagggttttcgtcgcgtttttttcgggatgaggcggggggtgtgggtgggtggcgcgtttttgacgtgggcgtttattaagattaagattagtttttaattaaagattttagagggtttcggttatatagtaggagttgtcggttcggaaagagatagcgatatatatttaatagtaagcgtagtatcgcggatttaggggaaggcggcgcgtaggttcgaggttcgggcgggggtgggtgttgggtatttcgattttgttttgcgggatttggaggcgaggaaatttttaaatttcgcgggggagttggcggcgtttttttttcgttcggtgtttgttttagaacgatttaagaaggatttgagttaaggggggaggggttcggtcggggggcggttatgagaaagtttcgtttagtttaatttgggttgtgtttgttttgagtggttttgcggtttggttgattgataattggtttttgtataagtttatttgtttttttgttaatatttatttcggggtgatattttaaatgtttttttgtttttttgggttatgggagttaggtaggagtgcggggttttaggtagagttttttaatttttgaagatttttgggtcgggagagaagttaggattgggcgtgtgggacgtaggagttggaagcgtttttgggtttaagagttgggggagaaggagttaagcgtagcggttttttcgcgtttcgcgttttggcgttgtgggtttggtgtcgcgtagttgtttttagttcgttgcggcgcgaataaagggttagtagggcgcgatcgatcgtgttcgtttttgagttcggggcgaggggcgtcgttagttgggagcgtttttttcgaaggtttaggatggttttttacggagattaaggagttttagagttcgttaggtcgaaaagtggtagtgtatttcggtagttaattggggatttttatatatatatatttagtcgattgtaaaattaaaaaaggtttcgtttttgcggatagttattagaaggttttgcgtggtgtttgttttacggtcggtgtttgttttttcgagggtgtaggattatagttttttttgtgtagttttttttgtgtaacgggtataaattcgggtgaggagagggaggtgcgtttggggataagaagtgggttcgtggcgacgattggaatcgttatggttggggtaggggaaatttatttttggggtttaaggggggttgatggttattgtgtggcgattttggtgttagcgtagttaggatgtttgttagagacgaattttattatttgttcggaggtatgcggttatttcgttaatgggtgtagtatttatcgttttggaagtattcggagagggatttcggtagttggggcgattagtttgatttagggtatagcggttgttagagatttagtttcgatatcgtcgtttattatcgatatttgggtcggatagtgttaataatagtacggttgtgttgtagtagtagaggatttaaattttaggatgcgtttttttttatttgtaagtttcgagtttttcgcgttttttgtttttttttattcggttttttttttgggggtagtcgggttgtgttgcggttgcggcgcgcgttttttgcgggtcgtcggggttgggcgattcgcgagcgttcgtggtttagttcgcggtagcgaagaaagggatgtttgttgcgtttttgtttttagaacgtcgttgttttagtgaattttaaaataataattattttgataggaagaaagtgtgaaggaggaagagaaggatatttagagggtttgtcggggtatttaataatgtttgggtgttatttaatttatgaaaataaaatttttatttttcgaagtatattttagttttaatttttttaaaaaagatgcgtatttggattttgtattcgaagtatgtttttgttggcgtgtttttatttaagaaaagcggggttagcgtagagaaggtgattttggcggttcgaagtcggaggttggagttgagggatataatattcggcggattggcggtttttttgttttgttgttttttttttttgtaaattgatcggagttaggaggtagttttgaggttttgagttgagaagtttttgtttttttttgtgtggggtgggtgaaagggttttcggaggtcgattggtttggagttttggcgcggagttaggattttggatagggttttatcgttttgacgtttggttttattttttttcgtttcggtaggtagatagaatgtttttgggaagttatagtaagaaaataaaaattaatagttaaagtttcgaagttttttagggcgttaggtttagtcgggaatatatattggtatattgaggtaatcgaaaagattaaatttattttcgtcgatcgggtggttgattttttcgtttttttacgcggttttgtgtgagtatttgagtgtacgtgtatatttgtttataaaatcggaattcgcgtttttgtgggtgtgataggggttggattattaagttaaaacgtttaatttagtttttttgattcgcgttggggaaaatttatagttatttttaatttacg

SEQ ID NO: 134 - DNA, 11667 bp, Artificial Sequence
  chemically treated genomic DNA (Homo sapiens)
cgggattcgtgggcgttaattaatgttatggtggcggagagtaaaggggacgaatatagtttggggttattttcggagttttttagcgttcgtttgtggtcgtgtttggttggtcgcggatttcggcgggcgtcgtaaagcggcgggattgttagcgtagagtttcggttttttgttttgtttttgggttcgagtatcggagtttttggtgtttgcggggagaagtttcggattgagaaatacgggagggtttcgttagtggttgtaggtgcggtagttattttggggatttagtgagaatggggtcgtttggttttgcgcgaattttttacgtgggtgtagtttttgagtcgtcgagggaggcggtggtaatgtcgtttagtgttagtagagggtagtttcgaggtcgtgagttcgaacggcgatttcgttaaatcgcgggtttttttttagttttcggattttgcggggtagaggcggttttggagtttagagattagcgattttagtttgtaggagttcggcgtagaggtttaagggtattttcgggatgtggttaagttatagtttttaggtagttttattttgcgacggtaagggtttagagggtggagggggattagatgttttaggaggggttagaaagttaacgtatatagggaatttgtttttaagtaatagattttaagtatgtggaaattttttaaatgatgttggtgagagttatgatagttttcgtatttttggcgagggaagtcggaggttagtagcgggatggtttttgggcgcgcgggagatagagggattagcgatttttgttgggggtagagggattgtggattaaggatttagatatatttaattggggattttagtttcgattgtggttatttaattggcgttgaatttgagtaatttattatatcgttttagttttcgattaattatttttgtaaaatgggtattgtgggtttcgagtttcgtaagggcgttagggattcgagatagtaggaatttttttattgttttagtaattttgggtttttgggtttgtaggtgggttgaaaggatttttttatcgtacgtttgtttggcgtggttgttttagagatcgaggttcgttaggttttgtaatttagttgcgcgtggttagttatggttttggaatcgtcgggatcgttttagcggtatttcggttagttttcgatttttcgttttgggtattagggttatttagttttagaagatagtgtttattagtataggaattgagattttatattcggcgtagtgggttttttaggaagtttggcgaagagttaaggttcgtcggatttgaggtcgtttggggcgttaaatagatttatttatgagtatattcggttaatatatttaagtttaatagtgggcgggatttttggttggtttcgattttttttatagtgtgtgtaaacgggtatttattagattttttttgtttgtttttttatttgtaaattttgaaaggagagtatttttcggggtgattttgaaaattatgttagaattgaaaaggtttgtgtaaatgcgaggtgtaatgatgatttattagaagtagttagttttgtacgtgtttgtaggatagatgttagaacgttttataaatgtgtgtatatatatattacgtatgtgtgaaggtgtatatttgtttttagatatttgataaatgtatatacgtatgcgtgtatttttggttgagagtaaaggggttaatatagggtttatataggatattattttgtagttttgtgcgtgtatagtatatacgcgagtacgattgtttgtgtttggagatatcgtatggtatcggaggagttgtttagtcgtcggtgttatttgggaagtagggtttcgggtgttgttttggagcgcgggaaagttcggattcgggtttgttggttagcgtttcggcgtcgtcgggtttttttattttttattcgtcggtcggtgagcggttttagttttaagattttcgattttgtcggtgaggggagggagcgagaaggagtgcgtttcgggtttaagaggttgtagggttttattttttaggtttgtcgttttttttttatttttttaggttatatttttatttaaaataaagaagggtgtttgatttatttaggttagggaagtcggttttcgggagttttttgtttttataagttatggtgaagggaggcgaagttagggtttgttacggtttgggagaaaatgcggttgtagggtttttttgggttgtagcgttggttcggggttttaagattgttaaggtgtgtgtgggaggcgcgtagtgtggttatcgaagagttttttattatcgtatcggtaggtcgtcgggttcgttttttttttatgtttttaagggttttgagttgcgtagtattcgtattatttagaagtgtttgtggagaaaacgattttaggtgtaagtttaaggttgttgtttgtaaaggtaatgtcgtggagattgggttttatagcgatttgggtttttaagttatcgaaagttatagggtagggttataaatattttttcgttttttttgtagaatcgtgcggttgataggagagcgttgcgtagaaaattcgaggtcgggcgttggaggagttttcgcggttcggagaaggtatagaggcgtttttgagaggcgtagttggaataggcgatgtacgggttcggatttggtcggttaatcgagtttagcggtcgcgaaaattagagtcgttatagaggttgagtacgattttatttttggggatcgggttcggtggggagttattgtttttaacgtttttagagattttaagtaggataatataatgttggtaggagtaaggtgtaaggaatttagcggtagaagtttttcgggggggtggggaaaggtagattcgtgtttcgtttgagtttgggggtggggatagtttttggttttgtagtttttgtttcggggattagttgggtttatttaatttttttatatggggttgaaaggggttaatgggacggtttcgtcgtttttttttcgggattttatagggttttgattcggtttttatttttgtacggttagtagtcgcgggggttttaggaaggaggataaaggttcggtgttatcgcgggcgggggttcggttttttggttttttgtttatatttatagtttttagcggttgttgggggaagatttttaaaaatatgtgtcgaatttttttttttttttttttagaaataaataaataaaaaaggtaaaaggcgaatttttttttatttttcgtttatagagattaaagttttttgggattttgttttttttttttttttgattgtttagaaatatttgtttttttttgtatatagaggaaaatgcggggaaaggttttttaaaattcggttttatattattattattattaaggataatcgggtaggttgaggttttaacgtggatgattcgagttggtttcgcgtcggggttttgtagttattgttttgtgcgtttagtatttttgggggcgattagggtttttgcgttttcgttcgtcgttcggtagtcgagagtattttgtgtttagattggtcgatttattttttttcgaattttgtttagagttggtaagggggatttagttcgcgttttaagatttgggtttgtagcgtcgttaataggttcggggatacgaggcgttttaggtcggggttttttcggttgttggtttttttcgttttttattcgttggcggcgtttcggtcgttcgtaattgatttaattcgttttttgcgtttgttttttaggtttttcgtttttttataaaggtttaggggagtttcgtttataggttgattttgtaatttttggttcggtggttattttttgtttttttgaaaaagaaaaggaaaaaaaaaaaaaaaaagaaaaaattaattagtcgagggaggcgcgtgaggattggaggcgttagtcggatagtttatgagtaggtttttgggtcggtgtcgtttcgcgggttagtacggttttttttagagaaaattttttaaacgtgtgaagatcgttttgggggaagcgagagggaggttggaggagtttcgggcggggttttagcgtttattagttgtgtttttagggtttgggtgttcgttgtaacggtaatcgcgtgagttttatttttacggttaaggggttagggtagggtggatgtaatcgcgtgcgtttggtttcggaaggtgttcgtagggggtgtttgtggttagttgggttaggaagttaaattttagaaagttattattaaaggtttttttttttttttttttttttttttttttttttgtttttttttttttttttttttttttaataggggaagggaaaaaatattattgaatatttattataaattgggtatttaaaaattagaaaatttaattattttaataattttgatatacgtacgtatttttgttttatagaggagaatattgaaatttgaatgggtattttgtttaaggttatatagttgttaaagaggatattaggttttaatttagttttttttgattaaataggttaggtttttgttttatgttgtataggttattttcgcgaagtgataagattttagaatatgttttttatagtttagtattaagtttgtgcggtaaatagtttgtgtagtagtagtttttgtggtatagaaataaataaaaaaggtaaaaggtatagtttagattgtgtttttttttttttttgggaggtttttttttattatttttgggaggtttttttttattacgtagtttttttgagtattagtggtagttaggtttagttgttgttaagttttttttaaaaatttcggaggttatttgttttatagatatttggaagatttttggttggttttttttttttttaggatttgagattttttaaatgtaatgtaattttgggtttttagatttaagatattttttttatgatagttgggagttttttttttagaaagtggaaagttgttaagattgttcggttttaagaatttttaatttttggttgtttcgaaggtatggggtttttagttttattttttttttattttttttatgggttttatagtttattttaagaagtaggggttgttatatagtggtggtaggtttgacgggtagggttttagggttattattaggttagatttgtagaatggggatattgtagggatgttgagtttgattaagatgttttttggttttagatttttatttagaagttaggagtttggttcggtgattttgtttatgaagtttggtttagatttttataaagggaagagtttagttgagagtaaattattttgggttagatttagatttttggtttatattttgtttgtttggttgtatgaagtttgggtttggttttaatttttattcgtcgttagggggttttttgtagttttatttttagttttggtttttaggaaattttggtaaaggttggatgtatttaatttcggatgaaaggtttagggttttttgtttatttaagttttagatttggagtagtgaattatttattgatgtaagttggaaataggacgttaatattttttggagtagggtataggattatttttagaatttcgtaggttttttttttatagttttttggtgtatgtattttaatggcgaagatttttttaggttttttttgagaataggatatttttttttgttttttttaaattaatttatttattttgattgggtaattttagtgaggtggaggtgattttaagaatttttgtgtaaatgtgaggagagggtttatattgttagtagtgtgtgagatgtttatatttattatatatataatttttatgtaagaacgatttattatttaggatatttagaaattggttgggtatttgtattaaattttatttatattgtatttatatattggttaatatatatatatatatttatatggtttagttatttaggttagattgtatatgttaaggtataattgttatataatttaaatatttttgtttttaggaattgtttaaattagtttttataatagaaatttaaaagtgcgaagagggagagaagagaaaggaaatgagagatgaagaaagtttgttattgaattaaattttcggttttggggaaaatgattaaatttaagagttttggagaaatttcgagggttggagttagatagattttttttgtgggtatttatggggaagtggggtatgatttggttttttttttttattttttttaatttttgtgtagatttaggaaatttttattgattgttttattttgttttttttatttggtgaggttgttgttttttttttagttttgggtgttttttgttttttagttttcggggaggagataggttggttttttattgttggtttcggttaattttttcgttttattggaggtgggttgttatttgtttattagggtttggttttggaagttttttttttttgttttttttgtttgagacggtagttgggggagtgttgatagttagttttagaatagggagtttttgtttgatgaagtaaaggttttgtttatattattttattttttagtaagttaggaatatatatttataaatgtatatattattaatgaggtatgaatgttatatatattgtggttttagtaagtattttttaagtgttagttatatgattattataatgttaaaaatatatgtttattttgtaggcgaatgatagatatatatattttttattttgttattaatatataattgatattgtatatatatatttgtagtagatatagattatataattatttgtttatgggttaaatttttacgttagataaagtataaatagatatgtatatagtaggttgttttttgttttgtaattttttttagttagatagtggagtagtcgggtattaaaggtatttagatattaggtttgattagtttttagggttttttgttttagttgagtttttttttttattttgtttttgtcggtttttggtaagttttagttttagttttgaggtgatgttttttgagaattttcgtggtttggttttttgttttgtagtttttcgtaggatgtttgtggggggcggggggtattttgagtagaagttatttgggtttaattatatataataggatattattttgaggtttttatcgtttgattattggagggttgaagtgagaggtttgtaggtttattttcgtggcgtaaaatcgtttttggtttattagtcggtttggatttgtcgttatattgttggttaggtttcgagatagacggggggggggtagtgagggttgggtgcggggtttagttttagttgagtagtagttcgtaagaatcggcggatttattttattagaagtcggaagttatttattttattagaagagtgaaagtcgattattttttaattcgtttgggagaattagattgtaattaggttaaacgtttgtgtgtttgcgcggaagtatggattttaattcgttatttggggattttagtaaaggaagagagagaaagaaaaaagattaaatttttgtagtcgcgaagtatgtttaatttttattgaaatttttaaattttttatttatattttaaggtaaatgaattttgattattaaaaataataaagtagttattttttatatttgtatagaggttagtagtttgtagcgtatttttataattagaattttatttattaatgtttggaataaatttttggttgttatagttgatttaaaatcgaaaagtttgagaataataataaaaatatagttagtttatatatttagtataattgtgtatgaggtagaatataaatttgaataggtataaaaataaattaagttttatttatagtcgcgttttgtgaacgaattacggtagaaaaagtttttttgttgacgttaaatagtcgtaacgggttagtgatgatatagaaaataaataattttaggaaaataaagtagtagcgatagttataaacgtttgttatttcggttgtttttaatttttgtttaatttattttgaaaaagataaaattttgttgaaaattttttttttttaattagttgttgaattaaggagcgatagaaataaagaagttcgtgttaaaagaaggaatataaaatttattcgggaatcgataaggtaaaaaataaaaataaaataaaaaaatataataaaagtgttttagttttttttagaaaatttggttttttaaataataagttatagtataattaggtttatggttttcgggtcgggtcggtttcgggttataagatcgtttaggtcggtcgttgtcgggttttatattttttttttttaaggtgggagaagtaggaggtttgaaaaataaaaagtagggaggacgagtcgttttagtagcgtgggttaggtaggtagtgatttttttgtttttaggatttgtatcgaaagattcggggatatttgtttttgatttttttttttagatagggagagggtgaaatttttttaattggtagacgaaattattttttattggatatatttttttaattttgaatatagttttttgaaggtttaataaaaattttaacgtaaattttttagaagagaagatgaggaatattaaagtttttgatttttatatttggatttagtaaattttaaggttataatattttttcggttgttcggtgaatttttttttttttttttttttttaaatatttttttaaaaagttttatcgattttttaaataaaatattagttagtcgtcggggttcggaggtgttcgaagcgacgggattgatagcggaggaaacgtagttttttttcgcgttcgttcgcggtgtaaatcgagtataggtcgtggagttaggttgtttcggttttcgttgggttttaattttcgtttcgtttagtgggtttcgcggtaagcggtttttgaatagttttaagagggttcgcggagtaaatatacgtattggttcgtttttttttcgggtagcgcggtttcgttattagttttgttcggcgcgtttagttatggattgtacggtagtcgggcggggaacgcggagagcgagcgtatcgatttgtgagagaaggttaagaggtttgcgttgtcgacgttcggtcgtattttcgtttcgggtttttttcgcggtgaatttgggtaggagacgttggggtttcggaaagagacgagtttagtagaaagcgcgtagagaggtagttttaggttaggggagtgtaaggttatagaggttagggaggtgagtataggaggatataaattgaggggataaagaggagcgataggagtttaggaaagcgaaaaagtatagagggattttgggcgttggttttagaggcgggtttagagggtgtgaggttaggttggcggcggcgtcgtcggttgcgatcggggtcggcgtcgcgcgtttttgtattttcgtattcgtttgtatcggtatgcggtgggtttttagagatcgaggcgcgaatgtagcgcgtcggttttgttgtcgtggttttagtaagagtaatgtattatggcgagttcgggttgtcgggtataagcgaattgtaggttcggcgtattggtgggcgcgggcgtcgggggcgcggcggtggttgggttggtagggttgagttggttcggcggcggcgcggcggtttcgtggtgcggtggggtaggcggcggtgcggcggtcgcgtgtagatggtgtgcgtgcggatgcgggtgggggtgcggcggaggcgggggtgcggtcggcgggttttttaggttattgtacgagtttattacgtcggggggtagcgttatgttttgtacgcgtgtgtacggttcgtacgaggcggtcgggttcgttagttttttgattatagcggtcgcgttagggttatcggggttcgcggttgtagtcgtagttgttgtagtcgttgcggttgtcgttatttggtaggaggtatagggtatgggtgagggaggttgcggtagcggttacgagttgttgaggaagttagattgtaggtatttggggggcgttaggtagtcgtagtcgtcggtttcggcgttcgttacgtcgtattcgtttgcggcgttttcggtttcgaagagttttttgtcgggttggaagtgcgcgggcggcggtcggaagggtttttttatgcggcggcggcgtcggtagttgtttttttcgaatatgttttcgtaggtcgggtttagcgtttagtagttgtttttgcgttcgtcgtcgttttcgcgcggtattttgatgaagtattcgttgaggttgaggttgtggcggatgttattttgttagttttttttatttttttcgtagaacgggaatttcgcgatgatgtattggtagatgtcggatagcgtgagtttttttttcgcgttttcgcggatcgttatggcgatgagcgttacgtacgagtacgggggtttttgcgtcgggttcggttttttcggggttgtttcgtcgttatttttatcgtttttgtttgggttcggcggcggtttttttggttttttgattgtgcgatcggtttttggggttagtagggttttcgtcgcgttttcgggttcggggtagttggttattatgataaagtcggcgcgtcgcggtcgggtcgtttttgtttttcgttttaggcgttggcgcggtaaagagttggggcgtacgagttcgtttacggttaagttttaaatttttggagattgcggatgtcgttcgcgtttgtttgttggaggtttgtcgttgttttttttttttttttttttttttttagggagcggtcggcgggagtggagtttagtttttggttatggggagttcgtttaatagagaggggtttcggtttcgtcgttttttttcgtttaggttagttttcgttttggtgggtttttttttttgcgtttttttttttttttcgtttttcggtttttcgaagtacgattcgcgtttttggcggagttgttttttggagtttttagtgcgttaggagtttcgttttgttttgattcgtatgggttttatcgagtttcgtttgcgttaggcgttttcgtttttatagcggggcggttagtcgcgtacgggcgagtttatttttaagttattttttgtaaacgtttcgtatagtttggatcggtttgttttcgtttagcgagttttaggggtttagtcgatagttaggtttacgcgtttttgaaatttgtcggtattcgttttgcgggttgggttgggagatgacgaggatttcggtggggtttgttcgtattcggttaaagtttaggaagttcgggttttagcgaggaaaggcgttttaagttttttcgcggtttttaggtgaaagaaaacgatttttttgttttgtcgtttgttgtcgttttgaggttgaatttttagttcggggttggggaggggcgagacggcgagggggttggacggggtagggtggggagagttgttttgaggttttgggaaagttagtttagaaacgggtgtgattgtacgaagaagtttcggtttggtttgtttttcgcg

SEQ ID NO: 135 - DNA, 11667 bp, Artificial Sequence
  chemically treated genomic DNA (Homo sapiens)
cgcgagggataggttaggtcgaggttttttcgtatagttatattcgtttttgggttgatttttttaaagttttagagtagttttttttattttatttcgtttagttttttcgtcgtttcgtttttttttagtttcgagttagaagtttagttttaagacggtagtaaacggtagagtaaaggagtcgtttttttttatttgaaagtcgcgaggaggtttggagcgttttttttcgttggggttcgagttttttgggttttggtcgggtgcgggtagattttatcggggttttcgttattttttagtttagttcgtagagcgagtatcggtagattttaagggcgcgtgagtttggttgtcggttgggtttttgaggttcgttgggcgggggtaggtcggtttaggttgtgcggggcgtttataaaaagtgatttggagatgaattcgttcgtgcgcggttggtcgtttcgttataggggcgaaggcgtttgacgtaagcggaattcggtggagtttatacgaattagaatagagcgaggtttttggcgtattagggattttaggaggtagtttcgttagagacgcgggtcgtgtttcgggaaatcggggggcggggggaggggaagagcgtagaaaagaaaatttattaaggcggggattggtttgagcggggaggggcggcgaggtcggagtttttttttgttgggcggattttttatggttagaggttgagttttattttcgtcggtcgttttttaggggaaggggaaggagaggggagagtagcgataggtttttagtaagtaagcgcgggcggtattcgtagtttttagaagtttgagatttggtcgtaagcggattcgtgcgttttaattttttgtcgcgttagcgtttggagcggagagtagaggcggttcggtcgcggcgcgtcggttttgttatgatggttagttatttcgagttcgaggacgcggcgggggttttgttggttttagagatcggtcgtatagttaaggagttagaagggtcgtcgtcgagtttaggtaagggcggtgggggtggcggcgggatagtttcggagaagtcggattcggcgtagaagttttcgtattcgtacgtggcgtttatcgttatggcgattcgcgagagcgcggagaagaggtttacgttgttcggtatttattagtatattatcgcgaagttttcgttttacgagaagaataagaagggttggtaaaatagtattcgttataattttagttttaacgagtgttttattaaggtgtcgcgcgagggcggcggcgagcgtaagggtaattattggacgttggattcggtttgcgaagatatgttcgagaagggtaattatcggcgtcgtcgtcgtatgaagaggttttttcggtcgtcgttcgcgtatttttagttcggtaaggggtttttcggggtcggaggcgtcgtaggcgggtgcggcgtggcgggcgtcggggtcgacggttacggttatttggcgttttttaagtatttgtagtttggtttttttaataattcgtggtcgttatcgtagttttttttatttatgttttatgttttttgttagatggcggtagtcgtagcggttgtagtagttgcggttgtagtcgcgggtttcggtagttttggcgcggtcgttgtggttaaggggttggcgggttcggtcgtttcgtacgggtcgtatatacgcgtgtagagtatggcgttgtttttcggcgtagtgaattcgtataatggtttgggaggttcgtcggtcgtattttcgttttcgtcgtatttttattcgtattcgtacgtatattatttgtacgcggtcgtcgtatcgtcgtttgttttatcgtattacggggtcgtcgcgtcgtcgtcgggttagtttagttttgttagtttagttatcgtcgcgttttcggcgttcgcgtttattagtgcgtcgggtttgtagttcgtttgtgttcggtagttcgagttcgttatgatgtattgtttttattgggattacgatagtaagatcggcgcgttgtattcgcgtttcgatttttgagagtttatcgtatgtcggtgtagacggatgcgaggatgtagggacgcgcgacgtcggtttcggtcgtagtcgacgacgtcgtcgttagtttgattttatattttttgggttcgtttttggagttagcgtttagggtttttttgtgttttttcgtttttttaagtttttgtcgtttttttttgtttttttagtttatgtttttttgtgtttatttttttgatttttgtgattttgtatttttttggtttgaagttgtttttttgcgcgttttttattgggttcgttttttttcggagttttagcgttttttgtttaaatttatcgcggaaagggttcggggcggaggtgcgatcgggcgtcggtagcgtagattttttggtttttttttataggtcggtgcgttcgtttttcgcgtttttcgttcgattgtcgtgtagtttatggttagacgcgtcggataggattgatggcgggatcgcgttgttcgagaaagggacggattaatacgtgtgtttgtttcgcgaatttttttgaagttgtttagaagtcgtttgtcgcggggtttattaggcggggcgggggttgggatttagcgggagtcggggtagtttggttttacggtttgtattcggtttatatcgcgggcgggcgcggagggaggttgcgtttttttcgttattagtttcgtcgtttcgggtattttcgggtttcggcggttggttaatgttttgtttgaaagatcggtggaattttttaagagagtatttaaaaaaaaaaaaaggaaaaaaaatttatcgggtaatcggggaagtattgtggttttggagtttgttaaatttaaatatgaaaattaaaagttttagtattttttatttttttttttggaagatttgcgttagagtttttgttgggtttttaaaaagttgtgtttagagttaggagaatatatttaataaaagatggtttcgtttattaattggggaagttttattttttttttatttgaagaaaaaaattaaaaataaatgttttcggatttttcgatgtaagttttggaggtagggagattattgtttgtttggtttacgttgttgggacggttcgttttttttgttttttgttttttaaattttttgttttttttattttgggaaggagaaatgtgaaattcggtagcggtcgatttaggcggttttgtggttcggagtcggttcggttcgaaaattatagatttggttgtattgtagtttgttgtttgggggattaaattttttagagagaattagagtatttttgttgtgtttttttgttttgtttttgttttttgttttgtcgattttcgaataaattttgtgtttttttttttaatacggatttttttatttttgtcgttttttagtttagtagttagttaaaagaggaagatttttagtaaaattttattttttttagaatgagttaaataaagattgagagtaatcggggtggtaggcgtttgtggttgtcgttgttgttttgtttttttgggattgtttgttttttgtgttattattggttcgttgcggttgtttaacgttagtagaaagattttttttgtcgtggttcgtttataaggcgcgattgtaggtaggatttggtttatttttgtatttatttaagtttgtattttattttatatatagttgtattaggtgtatgggttggttgtgtttttattattgtttttaaatttttcgattttgagttaattataatagttaagagtttgttttaaatattaatagataaaattttggttgtggaaatgcgttgtaaattgttaatttttgtataaatgtgagaagtgattgttttattatttttaatagttagaatttatttattttgagatatgggtaggagatttggaggttttagtaaggattgaatatatttcgcggttgtagaaatttagttttttttttttttttttttttttttattgagatttttaaataacgaattaagatttatgttttcgcgtaggtatataggcgtttgatttggttgtagtttggtttttttaggcggattagggggtggtcggtttttatttttttgatgggatagatgattttcgatttttgataggatagattcgtcggtttttgcgggttgttgtttagttgagattagatttcgtatttagtttttattgtttttttttcgtttatttcggggtttggttagtaatgtggcggtaggtttaggtcggttggtgggttaggagcggttttgcgttacgggaatgagtttgtaggttttttattttagttttttagtggttaggcggtaggaattttagggtggtattttgttatgtatagttgggtttaagtggtttttgtttagaatgtttttcgttttttataggtattttgcgagaggttataaggtaggagattaagttacggggatttttagggggtattattttaagattgggattggagtttattaggaatcggtaggagtaggatggagagggaggtttagttggagtaggaagttttagaggttggttaggtttggtgtttgggtgtttttggtgttcggttgttttattatttggttaaggggagttgtagaatagaaagtagtttgttgtgtgtatgtttgtttgtgttttgtttagcgtgaaaatttagtttatgggtaagtaattgtgtagtttgtatttgttgtaaatgtgtgtgtatagtgttagttgtgtattggtgatagggtgggaggtgtgtgtgtttgttattcgtttgtagagtgggtatatatttttggtattgtaataattatatggttaatatttaggaagtgtttattgggattatagtgtgtgtggtatttatattttattggtgatgtgtgtatttgtgggtgtgtatttttggtttgttgaaaaataaagtaatatggatagagtttttgttttattaggtagaggttttttgttttgaagttggttgttagtatttttttaattgtcgttttaagtagagaaagtaagggagggaagtttttaggattaagttttggtgggtaggtagtagtttatttttagtgagacggagaagttggtcggggttagtaatgaaggattagtttgtttttttttcgagaattgaaaggtaaaaggtatttaaggttgggaagagagtagtagttttattaagtaaggaagataaaatgaagtaattagtgagggttttttgggtttatatagggattgaaggaggtgagagaagggagttaaattatattttatttttttatggatgtttataggaaaaatttgtttaattttagttttcgggatttttttaaagtttttaagtttggttattttttttagggtcgaaagtttagtttaatggtaggttttttttattttttattttttttttttttttttttttttcgtatttttgagtttttattatagaagttgatttaagtaatttttgagggtaaaagtatttgagttatatagtaattatgttttagtatatatagtttggtttagatggttgggttatgtgagtgtgtgtatatatattggttagtgtgtaaatataatgtaaatagagtttaatataaatatttagttaatttttgaatgttttgggtaatgagtcgtttttgtatgaagattatgtgtgtggtgggtgtaaatattttatatattgttgatagtatgagttttttttttatatttatatagaaatttttagagttatttttattttattaaaattgtttagttagagtaagtgggttggtttggagaaagtagggggaggtgttttgtttttaagagggatttggagaaattttcgttattgaagtatatgtattaagggattgtgggaaagggatttacggagttttggagatggttttgtattttattttagagggtattgacgttttgtttttagtttgtattagtaaatagtttattgttttagatttgaggtttagatgagtaagaggttttggattttttattcgaggttaggtgtatttagtttttgttagggttttttggaagttaaggttggagatggggttgtaaggagttttttggcggcgggtggaaattggggttagatttaggttttatgtagttagataagtagaatatgggttaggaatttgagtttggtttaagatagtttgtttttaattgagtttttttttttatgaaggtttgggttaggttttatggataggattatcggattagatttttggtttttgggtgggggtttaaggttaggaaatattttgattaggtttagtatttttgtagtgtttttattttgtagatttaatttggtggtgattttggggttttgttcgttaggtttattattattgtgtggtagtttttattttttggagtagattgtgggatttatagaaaagatggggaaaggatgggattaagagttttatgttttcgggataattaggaattaaggatttttaaaatcgagtagttttagtaattttttattttttggagagaggatttttagttgttataaaaagagtgttttgggtttaggaatttaaaattatattatatttgaggaattttaggttttaagaagagaagagattaattagaggttttttaggtatttgtgaggtaaatggttttcgaaatttttaaaggagatttgatagtagttgagtttagttgttattgatgtttaagggagttgcgtagtaagggagagttttttaggagtagtaagggagagttttttaggagaagaaggaagtatagtttgagttgtgttttttgttttttttgtttgtttttgtattatagaaattgttgttgtataggttgtttgtcgtataggtttggtgttgagttgtgaaaagtatgttttgggattttgttatttcgcggaggtggtttgtgtagtatgaggtaaagatttggtttgtttagttaggaagaattgggttggagtttggtgttttttttaatagttatgtaattttgggtaaaatatttatttaaattttagtgtttttttttataaaatagaaatacgtgcgtgtattagaattattaaaataattaaattttttaatttttaagtgtttagtttatagtagatgtttaataatgttttttttttttttttattaaaaaaaaaaaaggaaggaaggaagtaaaaaaggaaagaagaaaggaagggggaaaaaaaatttttagtaataattttttaggatttgattttttaatttagttggttataggtattttttgcgagtatttttcggggttaggcgtacgcgattgtatttattttgttttagttttttggtcgtgggagtgaggtttacgcggttgtcgttgtagcgaatatttaagttttgaaggtatagttggtgggcgttgagatttcgttcggggtttttttaatttttttttcgttttttttaaagcggtttttatacgtttaggaggttttttttgagaaaggtcgtgttgattcgcgaagcggtatcgatttagggatttatttataggttgttcggttggcgtttttagtttttacgcgtttttttcgattggttgatttttttttttttttttttttttttttttttttttttagaaaagtagaaggtagttatcgggttagaggttgtagggttagtttgtgggcgaggtttttttaggtttttgtggagaaacgggaaatttgaggggtaaacgtaggaagcgggttgggttaattgcgggcgatcgaggcgtcgttagcgggtggggagcgagaggggttagtagtcgggaagatttcggtttggagcgtttcgtgttttcgggtttgttggcggcgttgtaagtttaggttttggggcgcgagttaagttttttttgttagttttaaataaaattcgggggagaatgagtcggttagtttgggtatagggtgttttcgattgtcgggcggcgggcggaagcgtaggggttttgatcgtttttagaggtgttgagcgtatagggtagtggttgtagagtttcggcgcgaggttaattcggattatttacgttgggattttagtttgttcggttgtttttagtaataataatagtatgaaatcgagttttaaaaaattttttttcgtatttttttttatgtataagggagaataagtatttttaggtagttaaagaaaaaaaaagggtaggattttaggaaattttaatttttatggacgaggagtgaaggggaattcgttttttgttttttttgtttgtttgtttttagaagagaaaaaaaggaaattcgatatatatttttaaaaatttttttttaataatcgttaaaggttgtgagtgtgagtagagagttaggaaatcgagttttcgttcgcggtgatatcgggtttttgtttttttttttgaagttttcgcgattgttgatcgtgtagagataaaggtcgggttagggttttgtggaatttcgagggaggggcggcggggtcgttttattggttttttttaattttatgtaggggggttaggtgggtttagttgattttcggaataggggttataaggttaggggttgtttttatttttaggtttagacgaggtacggatttgtttttttttattttttcgaaaggtttttgtcgttaaattttttgtattttgtttttattagtattatattgttttatttaaagtttttggaggcgttagggatagtggttttttatcggattcgatttttagaaatggaatcgtgtttaatttttgtggcgattttggttttcgcgatcgttgggttcggttggtcggttagattcgaattcgtgtatcgtttgttttagttgcgttttttaggggcgtttttgtgtttttttcgggtcgcggagatttttttagcgttcggtttcgaattttttgcgtaacgtttttttgttagtcgtacggttttgtagagaaggcgggagagtgtttgtgattttgttttgtagttttcggtgatttaaaaatttaggtcgttgtggaatttagtttttacggtattgtttttgtaggtagtagttttgggtttatatttgaggtcgttttttttatagatatttttgggtgatgcgagtgttgcgtagtttagaatttttggaagtatgagaggaggacgagttcggcggtttgtcggtgcggtgatggagggtttttcggtagttatattgcgcgttttttatatatattttaatagttttggggtttcgggttagcgttgtagtttaaagagattttgtagtcgtatttttttttaggtcgtggtaaattttggtttcgtttttttttattatggtttgtgagggtaggaggttttcgggggtcgatttttttgatttgaatgagttaggtatttttttttattttaagtgggggtgtgatttgaggagataaaggaaggacgatagatttggggagtggggttttgtagttttttgggttcggagcgtattttttttcgttttttttttttatcggtaggatcgggggttttgaaattggagtcgtttatcggtcggcggatgagagataaaggagttcggcggcgtcgaagcgttgattagtagattcggattcggattttttcgcgttttagagtagtattcgaaattttattttttaggtggtatcgacggttgagtagttttttcggtgttatacggtgtttttaggtatagatagtcgtgttcgcgtgtgtattgtgtacgtataagattgtaggatgatgttttgtatgagttttgtattagtttttttgtttttagttagaggtatacgtatacgtgtgtgtatttgttaagtgtttagggataggtgtgtatttttatatatacgtgatgtgtatgtgtatatatttgtagaacgttttagtatttattttataggtacgtatagggttggttgtttttaataagttattattatatttcgtatttatataggtttttttagttttggtatgatttttagaattatttcgggaaatattttttttttaaagtttatagatgaggaaataagtaaaaagaatttaatgggtattcgtttgtatatattgtgagagagatcgaggttagttaaagatttcgtttattgttgaatttgggtgtgttggtcgaatgtgtttatagatgggtttgtttagcgttttaggcgattttaggttcggcgggttttggtttttcgttaggttttttgggagatttattgcgtcgggtgtggggttttaatttttgtgttgataagtattattttttggagttgggtgattttagtgtttagggcgggaagtcgggagttggtcggagtgtcgttgaggcgatttcggcggttttaaggttatggttgattacgcgtaattgggttgtaaagtttggcgggtttcggtttttaaagtagttacgttaggtaaacgtgcgatgaaaggatttttttagtttatttataaatttaggaatttagggttgttggagtagtgaggaaatttttgttgtttcgaatttttagcgtttttacgagattcggagtttataatgtttattttatagaagtgattagtcggaggttagagcggtatagtgagttgtttaagtttaacgttagttgagtggttatagtcgggattggaatttttaattaagtgtgtttggatttttggtttatagtttttttgtttttagtaaggatcgttggtttttttgtttttcgcgcgtttaggagttatttcgttattagttttcgatttttttcgttaagaatgcgaaaattattatagtttttattagtattatttaaaaggtttttatatgtttggaatttgttgtttgaaaataaattttttgtgtgcgttggttttttaattttttttaaggtatttggtttttttttattttttaagtttttgtcgtcgtagagtgaggttgtttaagggttgtagtttgattatatttcgggggtgtttttgggtttttgcgtcgggtttttgtagattgaggtcgttggtttttgggttttaaggtcgtttttatttcgtagaattcgggagttggaagggagttcgcggtttggcgaggtcgtcgttcgggtttacggtttcgaggttgttttttgttggtattgggcgatattattatcgtttttttcggcggtttaggagttgtatttacgtgaggggttcgcgtagagttaggcgattttatttttattgggtttttagagtggttgtcgtatttgtagttattgacgagattttttcgtattttttaattcgagattttttttcgtagatattagaggtttcggtgttcggatttagggataaggtagagagtcggagttttgcgttggtaatttcgtcgttttgcggcgttcgtcgggattcgcggttaattaggtacggttataggcggacgttgggggatttcggggatggttttaggttgtgttcgttttttttatttttcgttattatagtattgattggcgtttacgggtttcg

SEQ ID NO: 136 - DNA, 1394 bp, Artificial Sequence
  chemically treated genomic DNA (Homo sapiens)
cggaatttcggttcgaagtcgagataggagattggatgcgaggtttttttagagttggttttttttaaataatttttaaaatttttagattttaggggtacgtcgaaattttttaaagtagtttaaagaatataacgagagttttaatattttaggtggcggcgcgttggttttttggagcggggcgggacgcggtcgcgcggatttacgtgtataatcgcgcgggacggggttacgcggatttacgtgtataatcgcgggattttagcgttagcgggattttagcgttagcgggattttagcgttagcgggattttagcgttagcgggattttagcgttagcgggattttagcgttagcgggattttagcgttagcgggtttgtggtttagtggagcgagtggagcgttggcgatttgagcggagattgcgttttggacgttttagtttagacgttaagttatagttcgcgtagtagtagtaaaggggaaggggtaggagtcgggtatagttggattcggaggtcgtgatttaggggaaagcgtgggcggtcgatttagggtagttgcggcggcgaggtaggtgggttttttgttttttggagtcgtttttttttatatttgttttcggcgtttttagtagtttttattttggtttttcgcggttattgcgggattcggcgttgtcgttagtttagtggggagtgaattagcgttttttttcgttttcggttttttcgacggtacgaggaatttttgttttgttttatagattttcggttttcgtcgagtgcggtattggagtttgtttcgttagggttttggaattagagaaagtcgttttttggttatttgaagcgtcggatttttatagtgttttttagtttgggcgggagcggcggttgcgtcgttgaaggttggggtttttggtgcgaaagggaggtagttgtagttttagttttattttagaagcggttttcgtatcgttgcggtgggcgttttcgggtttcgatttcgttagcgtcgcggggtagaggtatttggagttcgtagggtttagatttgggttggaaaagtttcgttgattgtaggtaagcgttcgggaggggcggttaggcgaagtttcggcgttttattatatattttcgggttttatgttagttgtattcgcggtattgggtaggaaatggtagggttgaggtcgattttaggagtataagggagttttttattttttgtttatatttgttatttttagttttgtaatttattttagatatatagaaagtaagtaggattggtggggagacggagtttaataggaatattttttagtagtgagtaggggttgtatgggacgcgggaggagtttagaggaggcgcggagagtgttcg

SEQ ID NO: 137 - DNA, 1394 bp, Artificial Sequence
  chemically treated genomic DNA (Homo sapiens)
cgggtatttttcgcgttttttttgagtttttttcgcgttttatatagtttttgtttattgttggaaaatatttttgttaagtttcgtttttttattagttttgtttgttttttgtgtgtttgggataggttgtaaaattggaggtgataaatgtgggtaggaaatggagggtttttttatatttttagggtcggttttagttttgttattttttgtttaatatcgcggatgtaattggtatgggattcggaagtgtgtggtaaagcgtcggggtttcgtttggtcgtttttttcggacgtttgtttgtagttagcgaagtttttttaatttaggtttgggttttgcgagttttaggtgtttttgtttcgcggcgttggcgaagtcgaagttcgagaacgtttatcgtagcgatgcgaaggtcgtttttggggtggggttgaggttgtagttgtttttttttcgtattaaggattttaatttttagcgacgtagtcgtcgttttcgtttaggttgggaggtattgtagggattcgacgttttaggtggttaaagagcgattttttttgattttagggttttggcggggtaggttttagtatcgtattcggcggaggtcgaaggtttgtggggtaggataggagtttttcgtgtcgtcggaagggtcgaggacgaaggagggcgttaatttattttttattgggttggcggtaacgtcgaatttcgtagtgatcgcggagggttaaggtgaaaattgttgggggcgtcgagggtaggtgtggggaggggcggttttagggagtaaggagtttatttgtttcgtcgtcgtagttgttttgggtcgatcgtttacgtttttttttgggttacgattttcggatttaattgtgttcggtttttgtttttttttttttgttgttgttgcgcgggttgtaatttgacgtttaggttggggcgtttagggcgtagttttcgtttaggtcgttagcgttttattcgttttattgggttatagattcgttggcgttggggtttcgttggcgttggggtttcgttggcgttggggtttcgttggcgttggggtttcgttggcgttggggtttcgttggcgttggggtttcgttggcgttggggtttcgcggttgtgtacgtgagttcgcgtggtttcgtttcgcgcggttgtgtacgtgagttcgcgcggtcgcgtttcgtttcgttttagggagttagcgcgtcgttatttgggatgttaggattttcgttgtgttttttggattgttttgggggatttcggcgtatttttaggatttaggagttttggaagttgtttgagagaaattagttttgggagggtttcgtatttagttttttgtttcggtttcggatcggggtttcg

SEQ ID NO: 138 - DNA, 6357 bp, Artificial Sequence
  chemically treated genomic DNA (Homo sapiens)
gtgtggagattgggaaggtgataaggtgaaggtaattgaaggaagagtcgagggggatatggggaaggattttgttttattttttttaagttgaattattgttttttgaaggtcggtttttggagaaattaaagggtttttgtgtgatatagttatgttatatataaatagaattttgaagtttattaatttttgaggttaagtaagagggaatgtaggggttaaggtagaagagaaattaaaattttagagcgttgagtaaagatgttaattagagaaagagaaatttatttgcgatgttaattaataagcggttaattaaaacggtattttgagtgttaattaatcgttttattaagttatagttattattggaataaattgaaattttttcgtttcgttttttgtttttggtgtaggcggggtcgcgtttttagatatcgtgagaggttttggggcgcggaggttgggggtagtttcggttagtttttttagttttttttaggtttatagaatacgttattggataagtgtttaagtagcgatttttggtttagatatatcgttcggggagtaagtagttgcgtcgaagaataatttatttagtagtagttaatatcgacgtttttttttagaaagagttttcgtaaagcggggggatgtgatttgtgggtttttagtaggggtaggaggtagtttagttcgagagggggcgttttagggtttggattttgtatttttattttttggaatatatttaacgttttattttgaaaattttgtttaggttttggttttggtgtcgtttagtaattaggaaagagttggatttgtttttaggtagtaagaataggattgttagttttttgtggttttgtttttcgaggttttatgagaaggggatgggggtgtaagaagggaagagtgaggtggtgtgttgggcgtcggggacgaggacgtacgttagttaagacgtgttttttatttagtttacgcgcgtttttttatttttttggttttttaaaatcggtaagagaattaagatttcgaatttttattttgaggagtttttcgtattttttaattgttaaatttttgttttttattaaattttcgggggagaaatatttggtaataagaagggattgtgaatttaaatgttaattgagtgggtttttttttcgtagttttatttgtttggtagtttttgttgaaattaaatatattcggagcgtttagtgtaatatttttggggtgtcgagtagaagcgtagtaaagagagattttagcggatttttgtttggtttgttttttatcgatttttatagaaaaaaagagaatgttattggaagaagtttttttgcgtggtgggcgatgtgtgggtgggggatttgtggtatggtttacggtgttgtttttgtgtttgcgatgatatacgtatgttttgagttgtgggttcgtttttttggaggtgcgttcgatcgtatttgttggtgggtttgagcgtgtttggggtgttttaggagaattgagagaacggtttttacgtgtaaagttttaaagtattaatatttttattatattattattatttaatataataatatttgttcggttagcggtattaattaggttatattaaaatcgtagtgtgtttttaatggtgcgtaatgtgtttatatttatatttttttttttgaggatgggcggttgtaggttggtaggggaggagagataggtaagcggcgggttggattagggcgtgacgttttttattacgtatataaatatatatagtttattggatgtttgtcgggtgggagtcgtaattttcgcgcggtcgatggggtttttcgttgcgtattcggttttgcgtcgagtattttgtagttttttttcgcgatacggcgttttgaattcggcggattgattttgtttttttttttttttttgtgtgtgtttgcgtttaattggttaggtttttaagatttgggagggttggtgtgaaagaattaaaatatttttaattggagttttttcgtcgagaattggaggtttcgttttttagttcggcgtttttaggattttttttttagagggaattttttttagaaattttagggtgggtttgtaaaagacgttttcgtagagtaggtttcgttagggttttttttttgtttttggtgttagcggtcggttcgggcgtttcgtagatttcggcgaggtagatgttaagttcggagagtgtttttttcgtaggcgtcgtggcgagattattttgaatatgtaatatatttgtaacgtgcgtcgaggtgtgatgtgtgtgttgaaatagggggatgggggaattcgaagtcggattgggaaggcgggggggaggcgtatagaatttataatgtatttcgtaatttaataatttgaatatttatttattaaaagttgttgcgtgatatttatattgagttattagtttttgtttttaattcgggcgaaaacgattgtattgtcgagttatggttgtagcgtatggggacgttgttgttcgcggtcggatagagtttattagttataacgcggaaggtttttgtatttttttgggggcgggaggaaagtattgttagttttgtttgggggtcgagggtaataagtatcgagtttttcgttttacgtagggttagttgtttagtttagcgaagtttttgtgatttggtgcgtgtttttcgtttttttttttttattaaagaagtaaattttttatttattttttttaattcgatcgtttagagttgttgttttttttttgttagatttttttttttcgattagtttgagtatacgattagaattgtttagagagtaggaagtatattgattttagtttgttttgtttatagataggttttgataaggttgttagaatagtcggagaggtttatataattatttaattattaaaattgttagttaggcgggacgcggattcgcgtttcgggttgcgttaggtattttagtattgggtcgcgcgcgtgattgatcggtgttgatagtatcgtaaaataattacggcgaattttttgatgtgtgattttattttaagtttatgttttagagaggtaatcggagaatgagaagggttagtgttatttcggattatttggaatttgcgagaaagggtaaaatgggggaaggagtttcgaggaaaacgggagagatgggggtgtagagagagagggaagaagaaagcgagttatggattgttggagggattgtaagtaattcgttaaattgtgtaagtgattttttttagagttagtatatggtagattgattttgtttaacgtcggttttagttatatttaaaatgatttagcggttattattgcgattggtttaggaattgataggtagttttaggcgtaaggagtatagattttgtttatcggagatgtgttcgtaattgttgttaaatatagttaagtaaatattattagcgaagagttttgttaagagaaatgttaatttaataaatatgtttttttttttcgtttttcgtatggttgtttgcgttttttttagaggtttttttttttgtttttttgttgtttgggttagacgttttaggtatggtgttgattttcgttattttggagtttcgagttgagtttcgggtagaagatgataggttagtcgtggggtaaggaggtcgcggaaacgcggaacggtttcggggagacggaagcgtttaatgagatttattttgtagttcgggtttagtttatttttttcggagattgtcgcggttttcgaattcgggtttaggtttttatgtttcggcggttagaggacgttgcggggattattggggagttgtttttagttagttttttgttttacgtcggaggttttggcgcggtttttttttcgaattagattggcgattttgggttaggttttaaggatcgtttcggttttttcggttttgcggggagaatttgaggaatcgagtttaagatagtcgatttaggttgtttttatttagattttgcgttttcgattcgttggagtgaatttgatattgttaggtttttttttatggtatggagtgaatgaagagggttatagatttttttatttagtatagtttttcggtaggttttggaaatttatagggagtagaagtatagtattttttgaatcgttttttttttttgggtttgtggttatttgaaggtagagttttgtgtttttaagatagtaggttttcggttaagtttggagtttggggttttaatatatttatatagggttggtattatcgtttttttggattaaaggtaggtttttatattttttttaaaggaatagaaggaaggaaaaggaaattaatacgggttatgtttagatagtaggtttatggtaattttttatagttatagagttttaattcgagtatttttttagagaggaaaaatttaaaaaatttttaaaagggggaaagttgggtagattatagtatttattttttatgtttaggtagaaaaattaatttagagggagtaaaggggtaagaaatatgaagagattttttttgggagttgaggagtattttagtttataatttggttaaaggagaaagttattggtttttttttttgatagaggcgtgttatttatttttttagggaatatgatggtttataaatgaagaggttagtttttttgtagtttttttttatagagtgtaaaatatatatcgtttttattagtgtttgggatgtaaagaattttgtttatttaaaagagatattgtatttttaaagttaaatagtattaatgtatgtggcgaattaagtaggtaaataatttatatatggttgttgtatttgaaggaattatttatttttatgtatagtaaattgaagaaataatggtattaatgagttttgtaaaatgtaattgtgaataatgaaagataatattgtattttgtaatagaaagaataaaggtgaaataattagttagtaaagaggaaaagaaagcgagtaatgattaaatgattaaaagttggtagagtgaatttaatgttattgttagacgtagttatttatttataagtgaaagttaggttttaagtatagtgtaattatagttggggttgttagtttgatattaatgtagttagtagaaattttttaattggttttagaggagaaagtgaattagaaaatatattaatattttaaaaaagtatattttgtttaatttttttattttcgaataatatttgaagattaaaatgttttaggtataagaatttaaatgagtaattttgtttttgaaggaaacggttaatgagatagaaaatagattaaagggaaattattagtggatgagagatattgataggtttgttttgttgattggttggtttgttatttgtagtttgtgttttttagttttacgttatgagttaagttgataatatgaaaagatttataaacgtgtagttagaagttatagtttattatttggaaatttaaatgtaaggggagggggtggtagagaaggtatcggcgaggttgggagggagaggtgtgtatcgagggaggaggaggaggaggaaggggaggagggaaaggaggaggaggaggagaaaagaagtttttattttttggtataaaatcggttatattagagaataataataagttattatttgttataaatgtgttatggattgttaaaaaatgtagtttcgaatcgataatattgttcgaattgaagatagtaataaaatgtttaaagttgcggatgtaattttatatgcgttcgggttgatgtgatatgatcgtattagggaaataaagttaagtgtagttaggatttgttagtatagtggtttttgatggaatagttgaggtatatatcgttcgtggtatggatttcggggtcgaacgtttacgattaagatttttgtttttttgaaatgaaatagaaataggggagttgtaggaaaatcgaatcgcgtttagggttaggagtaagataggagtttttagcgaagatttgaatatttagaattggaacgggtaattagtagatagttaggaaaaaataaataaataaataaaaaagtttggatggatttttgtaaataattattaagaaaaataaaaatgaatttttttattagtttgttttggaggtagttagaaataaataattaaagtaagagaggatgaagatttaaataaaataattatgtgtattattaaaataattatatatgtttgtatagatacgtatatattaaggaacgtaatgggggtttttcgtatagttttaggagatgtagga

SEQ ID NO: 139 - DNA, 6357 bp, Artificial Sequence
  chemically treated genomic DNA (Homo sapiens)
ttttgtattttttgggattgtgcgaggagtttttattacgttttttggtgtatacgtgtttgtataaatatatatgattattttaatgatgtatataattattttatttaaatttttatttttttttgttttggttgtttgtttttgattatttttaaggtaggttaataagaaggtttatttttattttttttaatgattgtttatagaggtttatttaggtttttttatttatttatttatttttttttggttatttgttaattattcgttttagttttgaatgtttagattttcgttgaaagtttttgttttgtttttgattttaagcgcgattcggtttttttgtagtttttttatttttattttattttaaaagggtaaaagttttggtcgtgagcgttcggtttcggagtttatgttacgggcgatgtgtgttttagttgttttattaaaagttattgtattaatagattttgattgtatttagttttgtttttttgatacggttatattatattaattcggacgtatgtgaaattatattcgtaattttaagtattttgttgttatttttagttcgaataatgttgtcgattcgggattatattttttggtagtttatagtatatttatgatagataatagtttattattgttttttgatatggtcgattttatgttaaagaatgagggtttttttttttttttttttttttttttttttttttttttttttttttttttttttttttcgatgtatattttttttttttaatttcgtcgatgttttttttgttattttttttttttgtatttgaatttttagataataggttgtgatttttggttgtacgtttatgggtttttttatgttattaatttagtttatagcgtggaattaaagaatatagattgtaagtgataggttagttagttagtaaggtaagtttgttagtattttttatttattaatgatttttttttagtttattttttgttttattggtcgttttttttaaaaataaaattgtttatttaaatttttatgtttggggtattttggtttttaaatattgttcgaaagtgaaaggattaggtaaaatatgtttttttaaaatgttaatatattttttggtttatttttttttttgaggttaattaggaaatttttgttggttgtattaatgttaaattgataattttagttataattatattgtgtttgaaatttaatttttatttgtgggtagatggttgcgtttggtagtgatattgaatttattttgttagtttttgattatttaattattgttcgttttttttttttttttgttagttgattattttatttttattttttttgttgtaaaatgtagtgttgttttttattatttatagttgtattttgtaaggtttattagtgttattgtttttttaatttgttgtgtatgagaatggatggtttttttaagtgtagtaattatatgtaagttgtttatttatttgattcgttatatatattggtattgtttgattttaaaaatgtagtattttttttaaatagatagggttttttatattttaaatattgatgaaggcggtgtgtgttttatattttgtagaaaaaagttgtaggagggttagtttttttatttgtgaattattatgttttttgggaagatagatgatacgtttttattaaaggaggaggttagtgatttttttttttgattaaattataaattagggtgttttttagtttttagaggggatttttttatattttttatttttttgttttttttgggttagtttttttgtttaggtatgaagaatgggtgttatgatttatttagtttttttttttttaaaagttttttgggttttttttttttgggaagatattcggattaggattttatggttgtgaagaattgttataggtttattatttgaatataattcgtgttggtttttttttttttttttttgtttttttaaaaaggatataggagtttgtttttagtttaaggaaacggtgatgttaattttgtgtaaatgtgttggggttttaggttttaaatttgatcgaaaatttattgttttggaggtatagagttttgtttttaaatggttataggtttagggagagggagcggtttagaaaatattgtgtttttgttttttgtggatttttagggtttgtcgagggattgtgttgggtaaggggatttatggttttttttatttattttatgttatgagagagaatttggtagtgttagatttattttagcgggtcggggacgtagggtttgggtgaaaatagtttaggtcggttattttggattcggttttttagatttttttcgtaaagtcggagaggtcggggcggtttttggggtttggtttagagtcgttagtttagttcgggaaagaagtcgcgttaggattttcggcgtggggtagagagttgattgagggtagttttttagtggttttcgtaacgttttttggtcgtcgggatatgaagatttaggttcgggttcgagggtcgcggtaattttcgaggaaggtgggttggattcgggttgtagggtgaattttattgggcgttttcgttttttcgaagtcgtttcgcgttttcgcggtttttttgttttacggttggtttgttattttttgttcgaggtttagttcggggttttaaggtggcgggagttagtattatgtttgggacgtttgatttaagtagtaaaggagtaggaaggagaatttttggaggaagcgtaggtagttatgcggagggcggggaggaaaagtatatttattggattggtattttttttaatagagtttttcgttaatgatatttatttaattgtatttgatagtagttacgaatatattttcggtaaataggatttatattttttgcgtttaaaattgtttgttagtttttaagttaatcgtagtaataatcgttggattattttaaatgtggttaaaatcgacgttggataaaattaatttgttatatgttggttttgaaggaaattatttgtatagtttgacgaattgtttgtagtttttttagtaatttataattcgttttttttttttttttttttttgtatttttatttttttcgtttttttcggagtttttttttttattttattttttttcgtagattttaggtaattcgaaatggtattgattttttttatttttcgattatttttttgaagtatgaatttgggataaaattatatattagaaaattcgtcgtaattattttgcggtgttattagtatcgattaattacgcgcgcggtttagtgttggaatgtttagcgtagttcgggacgcggattcgcgtttcgtttgattgatagttttggtaattaagtgattgtatagattttttcggttgttttaataattttgttagggtttgtttgtggatagaataagttgaaattaatgtgttttttgttttttgagtagttttgatcgtgtatttagattgatcggggaggaggaatttgataaaaggaaaatagtagttttaaacgatcggattagggggagtaggtagaaagtttatttttttgatggggagggaagagcgagagatacgtattagattataagagtttcgttgagttgggtagttggttttgcgtggagcgagaggttcggtgtttgttattttcggtttttaggtaggattggtagtatttttttttcgtttttaagggggtgtagaggtttttcgcgttgtagttgatgggttttgttcggtcgcggatagtagcgtttttatacgttgtagttataattcggtagtataatcgttttcgttcggattagaggtagagattggtggtttagtgtaaatgttacgtagtagtttttaataaatgaatgtttagattgttagattgcgaagtatattgtgagttttgtgcgtttttttttcgtttttttaattcggtttcgaatttttttatttttttattttagtatatatattatatttcggcgtacgttataaatatgttatatatttagagtgatttcgttacggcgtttgcgggaggggtatttttcgagtttaatatttatttcgtcgaggtttgcggggcgttcgggtcgatcgttggtattaggaataggaaaaagattttgacgggatttgttttgcggaagcgttttttataagtttattttggaatttttgaaagaaattttttttgggaagagggttttgaaagcgtcgaattaggaggcgggatttttagttttcggcggaggggttttagttaagagtattttaatttttttatattagtttttttaaattttaaaaatttaattaattgaacgtaaatatatataaaagggggaagggaagtaaaattaattcgtcgagtttaaagcgtcgtgtcgcgggaggaggttgtagggtgttcggcgtagggtcgagtgcgtagcggagggttttatcgatcgcgcggagattgcggtttttattcggtagatatttagtgggttgtgtatgtttgtgtgcgtggtggggggcgttacgttttaatttagttcgtcgtttgtttgtttttttttttttattagtttgtagtcgtttatttttagagagaaaaatgtgagtgtgagtatattacgtattattagggatatattacggttttaatgtggtttaattagtgtcgttaatcgaataaatattattatattgaataatgataatatgatgaaaatattaatgttttggaattttgtacgtgggagtcgtttttttagtttttttgggatattttaagtacgtttagatttattagtagatgcggtcgggcgtatttttaggaaggcgagtttatagtttaagatatacgtgtgttatcgtaggtatagaaataatatcgtgggttatgttataagttttttatttatatatcgtttattacgtaaaagagttttttttaatggtattttttttttttttgtaagagtcggtaaaaagtaaattagataggagttcgttagggtttttttttattgcgtttttattcggtattttaagaatgttgtattgggcgtttcgagtgtgtttggttttaatagaggttgttaggtaggtggagttgcggaaaaaggatttatttaattagtatttaaatttatagtttttttttattgttaaatgtttttttttcgggaatttggtgaaaagtaggaatttaataattaggaaatgcggaaggttttttaaaatagggattcgaaattttaatttttttatcgattttggagggttaggggggtggggaagcgcgcgtgggttgggtgggaggtacgttttggttggcgtgcgttttcgttttcgacgtttagtatattattttatttttttttttttgtatttttattttttttttatggagtttcgggagatagagttataggaggttggtagttttgtttttgttgtttgaaggtaggtttagtttttttttggttgttgagcggtattagggttagggtttaagtagggtttttagaatgaggcgttgggtgtgttttaggaaatagggatgtaggatttaggttttagagcgttttttttcgggttgaattgttttttatttttgttgggggtttataggttatattttttcgttttgcgggagttttttttaggaggaaacgtcggtgttaattgttgttgaatgagttgtttttcgacgtaattatttatttttcgggcggtgtgtttggattagaagtcgttgtttaggtatttgtttagtggcgtattttgtagatttgggagagattgagaaagttgatcgaggttgtttttaattttcgcgttttaaggttttttacggtatttgggaacgcggtttcgtttgtattaaaggtagaaaacggggcggggaggttttaatttgttttagtgatggttgtaatttaataaggcgattgattagtatttaaagtgtcgttttaattagtcgtttgttaattaatatcgtaaatgaatttttttttttttgattggtatttttgtttagcgttttgaggttttggttttttttttgttttggtttttatatttttttttatttagttttaggagttgataggttttagagttttgtttatgtatgatatggttgtgttatataggggttttttaatttttttaggagtcggtttttaaaggataatggtttaatttaggaggggtgaaataaaatttttttttatgtttttttcggttttttttttaattgtttttattttgttatttttttaatttttatat

SEQ ID NO: 140 - DNA, 9739 bp, Artificial Sequence
  chemically treated genomic DNA (Homo sapiens)
atggaagtatagaaatgtatttaataaatatgtaatagaaggataattaatttaatattaaagtgattagagagttaatgttagggttttatgggtatgttgatattttagaatagagaggattgaaggttagagattttgggtaatttgtatattaagaatgtttttaagttattggggggaaagatagagttttttttgttttatataaaggggtagatttaaaattatagttttttaaaatttttaaaaatttttgtaagatttgaagagagttttgttttaaattttagtgtatataatataaatatatattattaatatttataataagagattggaattaaagtgtatattattttttaaagttttttaaaattgtttttaattataaaaaggtaaattaaaaattttttttatgttatagtagtttaaaaggtaaataatggaagtagaaaggagatgtatatttgttgaaatttgttatgtattaggtattttatataatttatttttatttgatttttataataattggtaaggtgtgtgttgtaggatattaagaggttatagattttaggaggttaagaaatgatttaaaattttatatttaatagttggtatagtaaagatttgaagttaagaatatttgtttttaaaaattagttgtatattatgataatatattttaaataaagatgtataaaaagtatttggttttttatagatattatataaaatatgggataatattagtgatatatttaaatttagatattagaaagaagttttttttaatttattttgtaattgtaatttagttgtttattttataggtttttatagtaataattaaatatttttttttttgttttatatgtgtttttaaattgttattaaagatttttggttagtagtttttatattttttggtgttttgttgttaatgtttggtaaatatgggtagttaaggaaaatgtagatggtgttatggaatataaattatgataatatatggtatatatttagttttaataaagtgtgttttttaatttttgggtgttgttttattatttttttataagattatttatttttagggaaggtttagtttttaaaattagggtaataggtttatatgtgttatatggttatttagatgtatagattatgtgttttaatatttttaagtaagtgtatttagtatatgttttttagtattattatgtgtatttatgaattgttttgtttagatggtaagttttttgaggataagtgttatgtttgaaattttattttattaattgtgtatggtagagtaataatgttatttattttgtatatagagatatataatttataaattgtttttttaggtaaattttttaattatattgttatattgtgataattgttatattttttagatgaggtttatataggttaagtaattagttagaattataaattaataggtaatgttttttttttgtttataagagaaagttttttttgttttgtaatattttattgttttttttttttaaggtttttattataaaggttaatgtttattggttttttaataaaagtaattattatttagtatttagtatatatatgtaaggtattgttttaagggttttataaatattaatttatttaatttttttaattattttatgagatagatattatttttatttatattttatagataaggaaattgagggatagagagattaatttgtttaaaattagaggattggtaaatagtagtagtgaaatttgaatttagtagtgaagtatagttttatagtgtgtgtttttaaatatatattattttgtttgaataagagtttataaagatttttatttaggatatatgaggagttgtttagtaagaaaagaagtatgtttatttttttttatttgatgtatttgattatattttaaaatttttttttatgttaatagaattttgtgtattatattaaatttttttgtattgaaggtatatgtaatggttattttgattgatatgtaaaatatttaaaataaaatattttgagatttgaggattttttgttttatgaattagatattaaaaaaaaaattgtttaggtattagaagtgttatatatttatatttgtaagttttttttgggatttttagattttttatataagatttttttttgtttgaaatattttagtgtttatttaatgtttgagtttgaaaattatttaattttttttaatttttttatttttagttattttgtttttaggtatagggtagggtaagtatttgtttttaatatgatgtttaatattttttatgtttttatttttgttattttgaaaatatgttagtaaatatttaaatatattgtaaagatttaaaatttggggtgtgtatatgtatattaataggagttatgaattatgtatattgtaggtttatataaattagattttgaagaataagtattatagtaattaagtgggttataataagatattttatgtgaaatgtaaaaattattttgaataaattatttgtaagttaatatttttattagaatgatatatttattatttttgggtttgtgatattgttttaatgtattttggttaattgttttaatggtatattaagaaattattttaggttttttttttttgttggaatttgtagatttttatttttgtttgaattaaaataatataatattaaaaataattttttattttttaatgtataatattatttttttttgtttagaaatatttaattaaagtaggatataattttagtaattatttttatatagaatgatttttaaattaatagttagttgtatgattaaaaattgggagattgataattaaaataattttaaatgttttgtttatgtgatgaaaatgagtgattttttaatttttttatatatattaaattgattttatagattttttgtattggtgtttaatatagttaagtgtttgaggttatgtaaaataaataattttgagattttattgtaaatgtttgtaatttatgatgtaaattgatttgtgaagaaaaaataggattttatgttgttgaagttaaagaggtattttttagaaattaaaatagttttgaaatttgagtattgtattatattaaagtattattatttgaggatttaaaaaagttataaatttggggaaaaatttaaaatagatgtatattagtttagttttaagtaaaggtattgattttattattttattgtgttttttgtattatagggtttttaatattaatgatgttttaaataattttttttaatttagttttttttagttattgattttgtaatttgggaaggttttgtatgtttaaaagatttggggagtagaggatgggggtgttttttattaattatattaggattattgagttttgatttaaattataagtatgttgggttttatttaaatttaaagtgaattttttagatttttttttgggatggtttggggaattatgagtttggaatttttgtttatatattgaggtgtttgttttagagtttggatattggtattttgggagagtaggttttgtgggagtttggatttgaagggtgagattttatagggttaaggaaagtggtttttgttttttgttagttttgggggagtagatgtaagaggaggtaagggtgttgtgagttttttggatgtattggttttataggttgtgtttgagtggagtattgtgaatggggttaagaaattttggttttttttgttggatttggttgtttttgtgggtttttttgtttattgtgtttttgttgtggtttgatttttgtgggtttttgtgttgaatttatttggtttttattgtatgggatatttttgatttatttatgttgtgttattgagtttttgtattgatatttggtgtttttgttagtagggtttggatgtattgttttttttgattttgggttttttttgtgttttgttgtttggggtagattggttttgagagggagttattattttttttgttttagggtttttagggtttgaatttgtgttgggatttgggttaggattagggtttggagtttggagtttgtttgttaggatttttggttttggtgttgattggagtttgttggaggttataggattatggtggatggtttggttgttttagggtgtattatgtttgtaggtagatgtttattattaaaaattattgatgtttattaattaggagatttgtaaggtttgtgtattgaatatggtttaaattttgtttagtggtttttgaaagttaaaagaaagaaatttattgtttatgtttatgttgaggaatagttttgaatatgagttaagatttgggagagggttaagtgggggtggtggggaatattgttggaggatgtggggttttggtaggggttttatgtattttttagtatgagggtggggggttttaggggatgtttaggatttttttagtttttgtggaaggttttgttattataagagtttgtgtgggaaggaaagtttttgttttggatatggttagggttgagtttttaaagtttttaattatttttatataggtagtatttttgggttttattagtgggattttttttagaagggggttatgatatggggagagagagttttttattatttttaaggttaggttttttttaaatttgattttggtttttattttttaaatttaattaatgaagaagttgttttagttaattttaaataggagtgttagatggggaattttttttttatagtgttttggtttgtttgtttttgtggttttttttttgttttgaagttagtatttgttttgttttagagagggttaatgaattgggattgattgttgattatgttatattaaatttaggttgattttgttttgtaggatttttttttttttttttttaaaagtgtttttagataaagattggaattatagtaaaatgaataatgagagtttattttggggaaggaagttattttattttatgttattttattttttatttgtttttttattaatttggtataattttgtttttatgttgggtggataaaatggagggggttggtggaaatgtgtttagtgttaatgatagttatagagttattttttttattgttttttgattgtggtatgtaagagtagaggtaagtgtttttttaagttggtatatttgagagagtgatatgtattaattaaaagggaaagattattttggatattttaatagtaataggaataaagatgatttgaattttattaaatgaaatgatatttttatttaattgattgtaaagtgtttttaattaataatttggtatttatttaaaaggtttaatagaattggaggtgatatattttgtattgataatatgttatgagataatattttttgtttaaaataatttaatatattagaaaaaaatatgttaaatataaataattttgtttttatggagaataaatagttataaagtttaattgtatattaaagtttagttagaagagtttttttttttttttgtaaattagaaggtaaaataaaaataaaaataaaattttataaatttaggtttgttagtgaattgggatatagattggtttagtttaaggtattttagtttaaatagttatatgaattgaaataaataattaaaagaaaaaaaaaaataaaaaagaaataaataaataaaaaaaaaaggttatttgaatagatatatttttgtgagataaaatgtaaatgttgaaagttagtttatatattatagttaaaataaattttgtttgtgtgtattaatatattttatataaatttagtgtttgtatttagttgggtgttatttaaggtgaatttgatgggatagagagggggaaataaattattgtttttaaataggattttaggaaattaataagaaggaatataagaaaaggggaatggtgggaattaatattgattgagtgtttattgtgtttggtatagtgaggtgttgtatttttattattttatttggtggttttgtttttttttttttttttttatatattttgtttatttttgtttttttaggataatgagtgtaattttttttttttttgattttttttttttgttttttaggattaaagatagggtaaatatatatatatatatatatatatatatatatatatatatatggtaaatatatgatatatatatatggatatatatatattaatttttagatatttttggtattgttttttatagtgaagatgaaaatggagtgagtgtatgggagataagggggtgggaggagatatattattaatggaatataagtaatatgtaaattggaatttattgttagtagtttagatagttttgttataataattttttagagaaattattgtttgtggtatttttttgtgttaatattatttttttttttttttgttttaatattttttttttttttgtttttttatatatggtgggtttaaatttaaagtatttgatttaatgtaaaaggaggtttgttttttttattaaattttttgtgttaatgtgaattttgtagaaaaaggttagttttaaaatttgtgaattttttagttgtgtattttttttattttagttttttaaataagtatattttttttttttgttttgtttttttagtgtatttttaaaaatatatatttaagttggtaattttttttagttttttgagaattgtttgggttgtttttttatatttttaaatgtataaaatattttaattttaaaatttgtttttgttttttggttttttaattttagtttttgttaaatagtagttaagaaataagtttttttttttttttttttttttgtttgttttttgatttttttgtttgtttatttttttattgttaataagatttttttttttatgtaagagtttattgttgtagttttgtggtgagttaaattttgtggttttagtatttttttgtttagtttttttttagatttttttaaatttgtttttataaaatttaattttaggtttttgagtaggaaaatgggtaggagttatggagtttgtgtgttttgtgagatttttggttttgtgtggagtttggttttttgagtttaagatgtgataggggatgagggatggttagtgaggtgggaagagggttggtttttgaggttttaaaggggtaatggagaagtagtggggtgtggagggtgtgtaggttgagtgttgtgggataggtgtgatattggtgttggtgttggtgttatagatttagggttgtggtgtgttttttggtttttagtttgagattggtgatgttggagtttttgttggtggttttggtggttgttgtggttgttattattgaggtggtggaagttgaatttgtggttagtgtggtgagtggtagtttgaagggtggtgttgggaatattatgtagggtgtgtgtgtggttaggtgtggatgtaggtggtggtgtgtgtgtgttatagtgttgtttagttgtagttgtgtttgaatttgaaaggataagggtgttatgttgtaatgattattttagggtgataatagaatagaaatagagtattaatggtgtttagtttggttagagagagagttgggttgtgtttgggtatggggagagggtatttggttgtgtattttgttttgatagtgatttttttagtttgttgttgaatttggggttttatatggatattttagtgttttttgggtttttgaaatttgtttagggtaggtttatttttttggattttgggaatttttttttgtaggaatgtggttgttttttttgggaattgggttgaaatggtatattggaaagattgtgggtgaggatttttattttttttttttgatgttgttatgtattttttattttattattaaaataatggagtattaataagtaaattatgtaattttttaatgttatttagggaagttattttatttttattataataggtataattgtgagttggtatttttaatttttattgttataataattatttagggattttgttaaaatttagattttgatttgtaaggtttaggttggggtttgagattttgaatttttaataattttttagatggtgttgttgttgttggtttaaagattattttttgagtagtaaaggtttttttttaaagttatttttttttttttttttagttatttttttttgtttttaaagttaagtattaggatgttagagttttgtggtattaagagagttaagatttttttaatattgatttttaatttatggttatatttatttgtttttttggtttaagttattggagattgagagttaatttatgatattataggtatgttaagtaggggttttggttgaggatagggaaggttagatattggttgggaaaggattttgtttttaggtttggaaagtggggagtttagagtattgggattttttaggattaaattattgttgtaggttgtttttttaaaatgtatttttaaaggtttttttatggttaagggattgtaaaggtagggtagttttgggaagattaagatttttttttttattagagatgaagttttgtttgtagaaatagatttaaaaataaaagaatgaaaaaataaaagtatgagttgggagtatttgtgtttattttttttttgttagagttatttaatgtgattaagaggtagaaaatatttagaaaagtatttagagggttgttttagaaatattttaggattaatttttgtattggatttgataaaattttaattaaaaggttttttttttttttttttttaagggtaatttttagtgtatttttaaaggattagttattgtttttaggtttttttagggatttttatgaggatagaagggattaggtatttaggtttttaatattgtataggtttttaaagggtagtgggtttattatattattttaaaatgattttttaattatgtagatattgatatttgggtttagagataggtgatgtttaatagtttaagtaaatatttaggtatttttatatttaaaaatagtttgaaattaggttgtatttgtttgttgaaatggtatttttaaagtatttatgttgatataaggtgtgattttataagttttaaattggttggtggtttttatgagaatatttgtaaaaagtataagagaaaaataatgtgaggttaatgtttgtagtattttttagggttttaaagggtataagatagaatgaatttttttgaaaatggattattatttttttaaattgtatttaaaatttaaataaatgtaatttatttttaaattttaggattttattaatagtttttgaagattattaagttaagaattattgttatttttgaggtttttttttttttgttattgtaatagtaatatttattatttttttttttgtttagattattaaatgttttttgtataagaagtatatttttatggagttgatttttttgttttttatatttagttttttgattttgaaattaaatttataggttggagggggaaaaaaaataaaatttagatgttatgattaaaaatttttttaaattataaaagtataaagagaaaagagttgtg

SEQ ID NO: 141 - DNA, 9739 bp, Artificial Sequence
  chemically treated genomic DNA (Homo sapiens)
tatgatttttttttttttgtatttttgtaatttaaaaaaatttttagttataatatttaggttttattttttttttttttttaatttataggtttggttttaaaattgaagagttaaatgtagaaaataagaaaattaattttataaaggtatgttttttatataaggaatatttgatagtttgagtaaagagagaagtagtgaatattattattataatgatagaaaaaaaggaattttaaaaatgataatagtttttgatttaataatttttaaaggttgttaatggagttttaaagtttgggagtaagttatatttatttaaattttggatgtagtttagaaagataatagtttatttttaaaggaatttgttttgttttgtattttttggaattttgaaaaatgttataaatgttaattttatattattttttttttgtattttttataggtgtttttataggggttgttagttagtttgaagtttgtagagttgtattttatgttaatgtaggtgttttaaggatgttattttagtaggtaagtatagtttagttttaagttgtttttaaatatgaaaatatttgaatgtttgtttgaattgttgaatattatttgtttttgagtttagatgttaatgtttgtatagttggagaattattttgagatgatatagtggatttattattttttaaaaatttatatggtattaaaggtttgaatgtttagttttttttgtttttatgggaatttttgaaggggtttgggggtagtaattggttttttaaaaatatattaaagattgtttttagagagagaggaaggaaaagttttttgattaagattttgttaaatttaatatagaggttagttttaaggtatttttaaggtaattttttagatatttttttaggtattttttattttttagttatattaaataattttgatagaagaaaaataaatataagtatttttagtttatatttttgtttttttgtttttttgtttttaaatttgtttttgtaaataaagttttatttttggtaaagagagaagttttggtttttttagggttgttttgtttttgtaattttttagttataaagaaatttttaagagtatattttaaaaggatagtttgtagtaatgatttaattttgggaaattttagtgttttgaattttttattttttaagtttgagggtgaaatttttttttaattagtgtttgattttttttatttttagttaggatttttgtttggtatgtttgtgatgttatgaattagtttttagtttttagtgatttggattggggagatagataggtgtgattatgaattgagagttggtgttagggagattttagtttttttggtgttataggattttggtattttgatgtttggttttggaaataagagagaatgattgaagaaagagggaggggtgattttaaaaggagatttttattatttaaaaggtaatttttgggttagtagtaataatattgtttgggagattgttagaaatttagaattttaggttttaatttagattttgtgaattagaatttgaattttaatgagatttttgggtaattgttatggtaataaaggttagaagtattgatttataattgtgtttattgtggtgaagatggagtaatttttttgaatgatattaaaaagttgtgtagtttgtttgttgatattttgttgttttggtagtggggtaagagatgtatggtagtattaagagaagagggtaagggtttttatttgtagtttttttaatatattattttagtttagtttttaggggagatggttatatttttgtagaagggggtttttggggtttggggaaataagtttattttaagtgagttttggagatttaggggatattggagtatttatgtggaattttagatttagtaataggttgagaaggttattgttggaataagatgtatagttaaatgttttttttttgtgtttaaatataatttaattttttttttggttaagttggatgttgttaatgttttgtttttattttgttgttattttaggatagttattgtaatgtgatgtttttgtttttttaggtttaggtgtagttgtagttggatagtgttgtggtgtatgtgtattattatttgtatttgtatttggttgtgtatgtgttttatatgatgtttttagtattgttttttggattgttgtttgttatgttggttgtggatttggtttttgttgttttggtagtggtggttgtagtagttgttaagattattagtaagaattttagtattgttgattttagattgaaagttaaaaagtatgttgtagttttgggtttgtgatgttaatgttagtattaatgttgtgtttgttttgtggtatttagtttgtatgttttttgtgttttgttgtttttttgttatttttttgagattttgggagttggttttttttttgttttattgattattttttgttttttattgtattttggatttggaaagttagattttatgtaggattagggattttatgaggtatgtaggttttgtggtttttgtttgtttttttatttgagggtttagaattgggttttgtaggagtgggtttgggggagtttggagagagattggataggggagtgttggaattgtggagtttggtttattgtaaagttgtaatgatggatttttgtatagaaaaaaaaattttgttaataatgaaaaaatgagtaaataaaaaaattgaaagataaatgggagagaaaaagaggaagggaatttattttttaattgttatttggtagaagttgaaattggagaattaaggagtaaaaataaattttaaaattaaagtattttatatatttaaaaatatggaaaaataatttagatgatttttgagagattggggggagttattaatttaaatgtgtgtttttaaaaatgtgttaagaaggtaaagtagaaagaagaggtatatttatttaaaaaattaagatgaaaaaagtgtgtagttgggaagtttataggttttgaaattgatttttttttgtgaagtttatgttaatatgagaaatttgatgagagaggtgggtttttttttatgttgaattagatgttttgagtttaaatttattatgtatggaagagtaagaaaagagaaaatattaaaatgaggagagagaaaaataatattaatataaaaaaatgttatagataatgatttttttgagaaattattatggtaaaattgtttggattgttgatagtaaattttggtttgtatgttatttgtattttattgatggtgtgtttttttttatttttttattttttatgtatttattttatttttatttttattatgaaaaataatattaaaagtatttggaaattgatatatatatatttatatatatatattatatatttgttatatatatatatatatatatatatatatatatatatatatatttgttttgtttttgattttggggaataaaagaaaaaagttagaaagggaaaaaattatatttattgttttaagaagatagaggtgggtagaatatgtggggaaaggaaaaagaaaataagattattaaatgaaataatgaaggtatagtgttttgttgtgttagatatagtaggtgtttaattagtattagtttttattatttttttttttttgtgtttttttttgttggttttttgaagttttatttgaagatagtggtttatttttttttttttattttgttaaatttattttaaataatatttagttagatataggtattaggtttgtgtaagatatgttgatatatatgaataaagtttattttgattataatgtgtggattgatttttaatatttgtattttattttataaaggtgtatttatttaagtaattttttttttttgtttgtttgttttttttttgttttttttttttttttggttgtttgttttaatttatgtagttatttaaattgggatattttggattaagttagtttgtattttaatttgttagtaagtttaagtttgtggggttttgtttttgtttttgttttattttttaatttataagaaagaggaaaagtttttttaattgaattttggtatgtggttgagttttgtaattatttgttttttatgaaaataaaattatttatatttgatatatttttttttagtgtattaagttattttaaataaaagatgttattttatgatgtgttgttagtataaaatgtgttgtttttaattttgttaaattttttaaataagtgttaagttattaattgaagatattttgtgattaattgaatgaaaatattgttttatttgatggggtttgagttatttttgtttttgttattattaaaatatttgggatagttttttttttttgattaatgtgtattatttttttgaatatattaatttggaaaagtgtttgtttttgtttttatgtgttgtagttaaggggtagtaagaagggtggttttgtggttgttgttagtgttgagtgtatttttgttggttttttttattttatttatttagtatagaaatagggttatattaaattaatgaaagaatagataagaagtaaaataatataggatagagtaatttttttttttaagatggatttttgttatttgttttgttataattttagtttttatttggggatatttttgggaggaaggaaggagggattttgtggagtgaaattaatttgggtttggtatggtataattgataattagttttagtttgttgattttttttggagtggggtaggtgttgattttggagtgggaaaagagttgtaaaggtgggtaggttagggtattgtggagggaggattttttatttgatatttttgtttagggttggttgaagtagtttttttattggttaaatttagaaggtggaagttagaattgggtttaggaaaagtttggttttgaaaataatgaggagttttttttttttatgttgtggtttttttttggaagaaattttattagtaaagtttaaaggtgttgtttgtgtggggatagttggagattttgaagatttggttttgattatgtttaaggtaggaatttttttttttgtgtgggtttttgtgatgatgggattttttgtaaagattgaaagagttttgagtgttttttgggattttttatttttgtgttggagggtgtgtaaaatttttgttaaagttttatattttttagtagtgttttttattatttttatttggtttttttttaggttttagtttgtatttaaagttgttttttagtatagatgtgggtgataggttttttttttttaatttttaaagattattgaataggatttgggttgtatttagtgtgtaggttttgtgggttttttggttgatgaatgttggtagtttttaataataaatatttgtttgtgggtatggtatgttttgaagtagttaggttatttgttgtggttttgtggtttttagtgagttttagttggtgttggggttgggggttttaataggtaggttttaagttttaaattttaattttaatttagattttaatatgggtttggattttggagattttggagtaggggagatggtggtttttttttggggttagtttgttttaagtagtggagtgtgggggaagtttgaggttaaaggaggtggtgtgtttaggttttgttggtggaggtgttgggtattggtatagaggtttagtgatgtggtgtgggtgggttgggaatgttttgtgtgataggagttaggtgggtttggtgtggagatttgtgggagttgggttgtggtgggagtgtggtaggtggagaggtttgtggaggtagttaggtttggtgagaaaggttaaaattttttggttttatttgtagtgttttatttgggtatggtttgtgggattagtgtatttggggagtttgtggtgtttttgtttttttttgtgtttgtttttttaagattaatggaggatagaggttgttttttttggttttgtggagttttgttttttgggtttagatttttgtaaggtttgtttttttggaatgttagtgtttaaattttggggtaggtgttttggtgtgtgaataagagttttaaatttgtagttttttgaattattttaagaaggggtttgaggaatttattttaaatttaaataaggtttaatatgtttgtagtttgggttgaaatttaataattttaatataattaataaaggatatttttattttttgttttttaaattttttgggtatgtaaaatttttttgagttgtaaaattaatgattgggaaaaattgagttaaaagagattgtttaagatattattagtgttaaggattttatgatataagagatatagtaagatagtaagattggtgtttttgtttggagttgaattgatgtatatttattttgagtttttttttagatttataatttttttgggtttttagatggtaatattttagtataatgtaatgtttaaattttggaattattttgatttttgaaaaatgtttttttggttttagtgatataggattttgttttttttttataaattagtttatattataaattgtaaatatttgtaataagattttaagattgtttattttatataattttaagtatttgattatgttaaatattagtatagaaaatttgtgaaattagtttaatgtgtgtgagggaattaaaggattatttatttttattatataaataaagtatttaagattgttttgattgttagttttttaatttttagttatataattgattattaatttaagagttattttgtgtaaaaataattattgaggttatattttgttttaattaaatatttttgggtagaagaaaatggtattgtatattgggaagtgggggattgtttttaatattatattattttagtttaaatggaaataaaagtttgtaaattttaatggggaaaaaaggtttgaaatggttttttaatatgttattaaaatagttagttaaaatatattaaagtaatattataaatttagaaataataaatatgttattttaatgagaatgttaatttatagataatttatttaaggtagtttttatattttatatggaatgttttattatgatttgtttgattattgtgatgtttgttttttaaaatttaatttatataggtttgtaatatatataatttataatttttgttgatatatgtatatatattttaaattttaaatttttatagtatgtttggatgtttattagtatgtttttaagatgatgaaaataaaaatataaaaagtgttaaatattatattgaaagtaagtgtttgttttgttttatgtttgaaggtaaagtagttgaaaatgaaaaaattaaaaaggattagataatttttaagtttaggtattgagtgagtattgaaatattttagataaaaaaaaattttgtataagaaatttgaaaattttaagaaagatttatagatgtgagtgtataatatttttgatgtttagataattttttttttggtgtttaatttatgaaataaaaaatttttgagttttggggtattttgttttgggtattttatatgttagttaaggtaattattatatatgtttttggtgtaggaaagtttagtataatatgtggagttttattggtatgaggaaaggttttagaatataattaaatatattaaatagggaggagtaaatatgtttttttttttgttgaataattttttatatgttttgagtaaggatttttgtagatttttatttaagtagaatagtgtatgtttaagagtatatattgtggagttatgttttattgttggatttaaattttattgttattgtttattagttttttgattttggataagttaatttttttgttttttagtttttttatttgtaaaatgtggataaaaatagtgtttattttatggaatggttaggaggattaaatgagttaatatttgtaaaatttttagaataatgttttgtatatgtatattaagtattaaataataattatttttattaaaaggttaatagatattgatttttgtaataaaaattttaaaagaaaaaaataataaagtgttgtaagataagaaaagtttttttttgtgggtaagaagaaaatattgtttgttagtttgtgattttggttaattgtttagtttgtgtgagttttatttagaagatgtgataattgttataatgtagtagtgtagttaggaggtttatttagaagagtaatttataggttgtgtgtttttatatgtaagatagataatattgttattttgttatgtatagttaataaggtgagattttaggtatggtatttgtttttgaggagtttattatttgggtaaaatagtttataaatatatatgatagtgttaggaagtatgtgttaaatgtatttgtttaaaggtattaggatatataatttgtgtatttgaatggttatataatatatgtgggtttgttgttttggttttggaaattaaattttttttggaaatgagtagttttataaaggaatggtgaagtgatatttagaggttaagaagtgtattttgttaggattaaatgtatattatatgttgttgtggtttgtgttttatagtattatttgtattttttttggttgtttatgtttattgagtattagtagtaaaatgttaaaagatataaaggttgttgattaaggatttttaatagtagtttgaaaatatatataaaataaagaaaggaatgtttaattattattatagggatttgtaagatgaataattgagttataattatagagtaaattaagaaggatttttttttaatgtttaaatttaggtatattattaatattgttttatattttatataatatttatgaagagttaagtattttttatatatttttatttgggatgtgttgttatagtatatggttaatttttagaggtagatatttttgattttaaatttttgttatattaattattagatgtaaagttttaggttattttttagttttttaaaatttatgattttttagtgttttgtagtatatattttgttaattattgtgaggattaaataaaaataagttatgtaaggtgtttggtatataataggttttaataaatgtatattttttttttatttttattatttattttttaaattattgtaatatagagaggatttttaatttatttttttgtgattagaagtagttttgaaaaattttgggaggtggtgtgtattttaattttaattttttattgtaagtattgataatgtgtgtttatattgtgtgtattggagtttggaataaagttttttttaaattttgtaaaaatttttagagattttgagggattgtgattttagatttgtttttttgtgtagaatagaaaggattttatttttttttttgataatttgaggatgtttttaatgtgtaggttatttagagtttttgatttttagttttttttattttggaatgttagtatatttatggagttttggtattaattttttagttattttgatattagattgattgtttttttgttgtatatttattgaatatatttttatgtttttgt

SEQ ID NO: 142 - DNA, 4313 bp, Artificial Sequence
  chemically treated genomic DNA (Homo sapiens)
gggtttgattttttgagatttggggaggatttttggtagatgtgtgtttagttagaatatttggtaaggatttttttaatgaagaaaaagtggaggaatttagttttagtgagaagaggtttttttattttgttttagatatattggatagagggtatattttgattagagttatgtttagtggttaggaggttagtttagtatttttttttttattatttttgttttgggtgggggggtaatttttttgggagtagttgtgggaattgttgttttttattttagtttagttagtattttgaagtttgtaggggaaggatagtatgtgggatggatattggggaaggagttttgtaaggttagggtgtaatttttaggttttaggtggtttggtaggttatgttgttttggagatgtttgttagattttttaagtttatttagggtttggtagtaatttgttggttgtttttgtgggggtttgggttgttgagtatggtgtagttgtttagggttaattagttttagggtgtttgtgttaggttgtggtttttttgttttttttgtattgagggtatttatggtgtgtaaatgtttttgtatttttagagttgttttattggatgtttttaggaatttatatatttttataaaaatgtattttaaatgatggataggtgagtttggggtaataatgggtgtttggtgggtagataagagtaaatgggaaggagtttgagggaggagggggaagagaagaggaaatagaatttttagttggatattttgataatagttggaaggaaagtttagaaaagatgaagagagaggaggggagaaattaattggggtttttatttttgttgttggatttttaatttttgttttaaatgggttttgttttttggtaaaattagtttaaaggattttaaaataaagaaaatgagatgattggtttgggagttttttaattagagtagagaagttagaggggggtgggtgatttggttttgaagttttagttgaatagttattttttttttttttggtaaaaaggatttttttagaatttttgaggtttttggatttttttttttgtaaatggagttgtatattgtatttttttgtttttttggattgttaagtatgttttatgagggttgttgtttttgggtggaatgtggttgtatgtatgtgtttttttgtatatgtatatatatgtatatttataataagtgtttgtaggaggagtgttttgtgtgttagttttgtgtttaagataggaagttgttgggttattgagttaaatgggagtgatattatttttttttattagtaaggaaagtggattataaaagtttttttgtattttggtagtttatttaatattatttatgtattttgtgtaaggaattgtgggattttgttttatggtaaataatatggaaattttaaaaatagtgatttttttgtgtgtgtttatttatgtgttttggggtgatttggtggggttgttgttgggtgatttatatttttgaattgtgaagtgatagggaaagtgtgggtgagtgtaggagatgtggttgggggtttttttgggtttttgggtttttgtatttggagtgggggatgtggttgttttaaggggaggaggggtggtgggttgtttttgttatttagtggtggttggagtgttatgtgggtgtgtggtgttgtggttattggtttgaggtatgtgtttaggagattggtttgtgatgttatttgagggggttttgttaaaaataagaataaaaatttagagtgaaagtgttttaggttgtgttgagtggtttggaaatttttgagtttgtgtggaggttgaggtggtgagggtggtggatggttggggagtgtgggtggtttagtttggtttggttgggttttggttttgtgttttttatttatgtgatttgggttgtggagttttgtggggtttggtgggggtgtggttgtatgttggtggggtgttttggtttgtagtggggtggtggttgtgaggagggggtttttatgtgtgtgtgggtggtggtgggtgtgttgattgtgggtgtttggtatttttgagggttggttagggtgtgtgggtggggatggttgggtggtggtggtggttggagttggtttgggtgggtgtgagtgttggggaatgtgttgtttgtatgtgtgtagtttttgttttgggtggtttaggtggtggtgttggagtttgaggtggttggatgtggagaggagtggggagtttgggaggtggtttgtgtttttgttggattattgtgattgtttagattttggttgtgtggtgaagttgaggatttggttttgttgaattttttattgtttgggtgagtggggtggtttgtggtgtttttaatttagtttgtggatttaaaggtggttttgtgttgagtgtggttggtgatttgtaggattttagttttggttgtggttgttgtgtatgtttttggaagatttggtggggtgggggtgtgggggtttttgtgtgtgttgtgggagggttgaaggttgatttggaagggtgtttttggagaattagtgtgggatttattgtgaatagtatggaggagaatgattttaagtttggtgaagtagtggtggtggtggagggatagtggtagttggaatttagttttggtggtggtttgggtggtggtggtggtagtagtttgggtgaagtggatattgggtgttggtgggttttgatgttgtttgtggttttgtaggtgtttggtaattattagtatttgtattgtattattaatttttttattgataatattttgtggtttgagtttggttggtgaaaggatgtggggatttgttgtgtgggtgtgggaggaggaaggggtggtggagttggtggtgaaggtggtgtgagtggtgtggagggaggtggtggtgtgggtggtttggagtagtttttgggtttgggtttttgagagttttggtagaatttgttatgtgtgtttggtgtgggtgggttgtttttagttgttggtagtgattttttgggtgatggggaaggtggttttaagatgtttttgttgtatggtggtgttaagaaaggtggtgattttggtggttttttggatgggttgtttaaggtttgtggtttgggtggtggtgatttgttggtgagtttggatttggatagtttgtaagttggtgttaatttgggtgtgtagtttatgttttggttggtgtgggtttattgtatgtgttatttggattggttttttttaggtgagtttgtggggattatgtgttttggtttgttgtggggaggtttgtggagttggggggtggtgttggtgtgggaatttattgggaggaaaatattttgaattttttttgtgtatatgtataaagatttatgtgatattgtgtgaagttgatgttggtttgggtagtggttaggagtttagtggtaggattgatttgttagggggtatagattttttaggattgtagaagggattttttttttttttttgttttttttttttttttttttttttttgttttttttttttgttttttattttgttttggtgtatttttttttagtttttagtttatgttttttttattgtagttttttttggtgggaatgtggtggttggaagatgggtttggaagtgtatatttttatttttttttttatgattttttaatttaggttaggttggggatgtatgttttagtttattttagatttgttttattatttggttattttggttgtgtttggggaagaaaaggtgaggttttttgttgttttgttttttgttttttgggtttgtgttgattggtgggatttaggaggatgtatatagggaaggaggaaaataaaggtgttttttttttttggttttattttgtttgttagtgttagtttgtagtggtggggtttagttttttttttgtatatagtgaggataagggaggtagttgttttttttggtatttgttatttttaaatagaaaggatttttttttagggttttttgggggttgttgatgggaaagaggtagtatttgtaggggttttgtagagatgttggatatatttttttatagatttgtgattttaaaaaattaagtttatgtttttgtagaaattattaattgtattttatgtgggtttgtggttgggaattgttattagaagtggattgtttgattttgagttggtagtggatttttgttgtttttaaatttttaattattttgtgggggttatttgtttagatt

SEQ ID NO: 143 - DNA, 4313 bp, Artificial Sequence
  chemically treated genomic DNA (Homo sapiens)
gatttgggtaaatgatttttgtaaaatagttgagggtttgggggtagtggggatttgttgttagtttggggttaaatagtttatttttaatggtggtttttagttgtagatttgtatggaatgtagttgatgatttttataaggatatggatttagttttttaaaattgtagatttatgaaaaaatatatttagtatttttgtagggtttttgtgaatgttgttttttttttattagtagtttttaggaaattttgagagaaggttttttttatttggggatggtaggtgttgggagggatggttgttttttttgtttttgttgtgtgtaggaagggggttgagttttattattgtgggttggtgttggtaaataaagtggagttaaggggaaagggtgtttttatttttttttttttttgtgtgtatttttttgagttttattggttagtgtaggtttgaggggtagaaggtagagtggtaaagggttttgtttttttttttttgagtatagttgggataattggatggtaggataagtttggggtgggttggggtatgtgtttttggtttggtttgagttggaagattgtagggaaggggatgagagtgtgtatttttgggtttattttttagttattatgtttttattaaaaaaaattatagtgggggagatatgggttaggggttgggaagagatgtgttaaggtggggtggaagatagagaggggagatagggagagaggaaggagagagagagatagagaaagaaagaaggttttttttgtggttttaagaagtttgtattttttagtgaattagttttgttgttggatttttggttgttgtttgggttggtgttagttttatataatgttgtgtgagtttttgtgtgtgtgtgtgggggaggtttgagatgttttttttttggtaagtttttgtgttagtattgttttttagttttgtgggtttttttgtggtgagttgggatgtgtggtttttgtgggtttatttgaagaaggttggtttgagtagtgtgtatagtagatttatgttggttagagtatgggttgtgtgtttaggttggtgttggtttgtgagttgtttgagtttgagtttattgataggttgttgttgtttaagttgtgggttttgagtgatttgtttagggggttgttggggttgttgttttttttggtgttattgtgtagtgagagtgttttggagttgttttttttgttatttggagagttgttgttggtggttgggagtggtttgtttgtgttgggtgtatatggtgggttttgttggggtttttgggagtttgagtttaagagttgttttgagttgtttgtgttgttgtttttttttgtattgtttgtgttgtttttgttgttggttttgttgtttttttttttttttgtgtttgtatagtaggtttttgtgtttttttgttggttgaatttgggttgtaggatgttgttgatgaagaagttggtgatgtggtgtgggtgttggtggttgttgggtgtttgtaggattgtgggtagtattagagtttgttggtgtttggtgtttgttttgtttgggttgttattgttgttgttgtttgagttgttgttggggttggattttggttgttgttgtttttttattgttgttgttgttttgttaggtttggggttatttttttttatgttgtttatagtaaattttatattggttttttggggatgtttttttaaattagtttttggtttttttgtggtgtatatggagatttttgtgtttttattttgttgagttttttgagggtgtgtgtggtggttgtggttagggttgaggttttataagttgttggttgtgtttggtgtggagttatttttgaatttatgaattgggttagaaatattatgagttgttttgtttgtttagatgatgagagatttaatagagttaagtttttgattttgttgtgtagttggggtttagatagttgtagtggtttggtggggatgtgggttgttttttgggttttttgtttttttttgtgtttggttgttttgggttttggtgttgttgtttgggttgtttggggtgagagttgtgtgtatgtaggtagtgtgttttttggtgtttatgtttgtttgggttggttttggttgttgttgttgtttggttgtttttgtttgtatgttttagttggtttttgagggtgttgggtgtttgtggttagtgtgtttgttattgtttgtatgtatatggaggttttttttttgtggttgttgttttgttgtgggttggggtgttttattggtgtgtggttgtgtttttgttgagttttgtagagttttgtggtttgagttgtatgggtgagagatgtgaggttagggtttggttgggttgggttgggttgtttgtgttttttggttgtttgttgtttttgttgttttggtttttgtgtgggtttggaaatttttaggttatttggtgtaatttgagatatttttattttggatttttgtttttatttttaatagagtttttttgagtgatgttgtaggttggttttttggatatgtgttttgggttaatggttgtggtgttgtgtgtttatgtgatgttttggttgttgttgggtgataggagtagtttgttgttttttttttttttaaagtggttgtgttttttgttttgggtgtgggagtttaggaatttggagagatttttgattgtgttttttgtgtttgtttgtgttttttttgttgttttgtggtttaggggtgtgagttatttggtgatagttttgttaggttattttggggtgtgtaggtggatatgtataggaagattgttatttttaagatttttatattgtttattgtggggtgaaattttataattttttgtataaaatgtataaataatattaaatgagttgttgagatataaagggatttttgtggtttgttttttttgttgatggagaggaatagtgttatttttatttgatttggtaatttggtagttttttgttttaaatgtagagttggtgtgtaggatattttttttgtagatatttattgtaagtgtgtgtgtgtgtgtgtgtgtagggaggtgtgtgtatatggttgtattttatttggggatagtgatttttatgaaatatgtttagtgatttgaaagagtgggggaatgtagtatgtggttttatttgtgaagggagaaatttaggagttttggaggttttaaaggaattttttttgttaaggagaggaggggtgattgtttagttaagattttaaaattaagttgtttgtttttttttaatttttttattttgattgaggagtttttagattggttattttgttttttttgttttaaaattttttaaattaattttgttggagagtagggtttatttgaaatgagaattaggaatttaatggtaagggtgggagttttagttggtttttttttttttttttttttattttttttagattttttttttagttgttgttagaatgtttaattggaagttttgttttttttttttttttttttttttttttgggtttttttttatttgtttttgtttatttattaaatatttgttgttattttaggtttgtttgtttattatttaaaatgtatttttatggaaatgtgtgaatttttggaaatatttgatagggtagttttgggggtgtgggagtatttgtatgttatgagtatttttagtgtgggggaggtggggaggttgtagtttggtatggatattttagggttgattggttttgggtagttgtattgtgtttagtaatttagatttttgtagaggtagttagtaggttgttgttaggttttgagtgaatttggggagtttggtaagtatttttgaggtagtgtggtttgttaggttatttggggtttgaaggttgtattttggttttgtgaagttttttttttagtgtttattttatgtgttgttttttttttgtaggttttagagtgttggttgggttgggatgagaaatgatagtttttatagttgtttttaggaaaattatttttttatttaggatgggaatggtgggggaggaggtgttgggttggttttttggttattggatgtggttttggttagagtgtgttttttgtttggtgtgtttagggtagggtggggaagtttttttttgttggggttggatttttttattttttttttattggaggagtttttattaaatgttttggttaggtatatatttgttaggggttttttttgagttttaaaaaattaaattt

SEQ ID NO: 144 - DNA, 16197 bp, Artificial Sequence
  chemically treated genomic DNA (Homo sapiens)
ttttgtaggtggagggggaaagggtttgggggttggtggaggatgtaggagtatgggggagttgtggaaaagatgtggaggtagagttagtaggttttgttaagggataggaggtggttttagagagaaaatgagggattagggatgttttttggggggtggttagttgggtgattgggagaaattgggaaggtgtagattagggtagtaggggtagtgggattgggggtgttttgaagtgaatatgtgaaattgaaggtgtttgttagttttttagtggaggtatttaggaggtagttggaattggaaggaaatggtgatagttgttagtattgtagaggtggtggtggtggtggttatagttggatttttttgggttggtgggaagtgtggaggtgaaggagtagggagtagggggaggtggagaaggaaattttaggtttatatttttattttatttttggttgttatatttttaggaagttttttttgaggttgggatagagggtggggatagtttagtttttttgagagagtttatttttggaggtttgtggtgggagttagggtgtggtggagagggttttttattttttttttagtaagtgggagggaggtgttgggttgaggttgtgttgagtttgagtttgttgtttgggtggatttgttttgtttaagtgtggaggggtggaggtttggttgggttgtagtgtggtgtggagtaggatgttgttttgtgttatggttattggagatgtatgtttatttttttttttgggtttgttgattttgttattttttgtttttggttgtttgtgggtgtttgttatttagattttttttgtgttttatgggatgtaagtttttttttagagtttggttttgtaaaagaggtttggagtttttgttatagattttttttttgggttatggaggatgagaagggttattgagttgagttgtaattttgtgtaatttttgatttttttttttttttgtttttatggtattttattgttttttttttgtttttgaggttttttagaaaatagtgtagaattgtgtagatgtttaggagatgtgaagatgttggagatgtttaggaggtgatggttatgtgaggagaattgtttttaggtgtgtttttggaatgtatggagattttttggtggggaaggggttggggtttgtgttatttagtgtttgtttattgatttttttttgaagagggggtttagggtttttgttgagggagtggggaggtggtgtgggttttttttgggtatatatgggtgtttgttttttttttttttttttttttttttgtatggagagtggagagtggagagtggagagtgatagggaggtagttgaagatttgaattttgaaaggggagttggtggtgaatggtgaatgagatagttatttaggaagtgagtttagttagtttgggaggtggtggagatttatgtttggaagtaattggattaggttttagaatgtgattgttttttgggttttgggggagatgttaaggatgtgtaagtggagggtgtggagataattgggagttagagtttttattatttgggttgggaatgtttttgggtgttttgatggggtggtggtgggggttgggggaggtttttgagaattgtgtggtttggggagagtttatttattgttgagttttgatataggttttgaagttgttgtagtggtttagttttttttttgtttggttttgtgtagtgtggtgttgtagagtttaggttgtgtttttgttttgttgtttagagtttattgtggtggtttattggattatgttggtggggtgattgtagtttttgatttgtgagttgtaaagagttttgaggtttatttataaatttgtgtttttagttgtttttttatgtatttgagttatgttttgggatttggagagtttggggtgttgggtgttgtggaggaggtttggtttttgttgttttttttattttttagtttgtgagggatttgggggaagggggagtaagtttttgttttggaagaaatgtttggaattaaggagtttgatttttggatttgggtgtttgttggatttaggtttttatttttgggttttttggttgaattaagggttttgatagggtttgaggtatttgtatttttaggagataggagtttggttagggtgtattattgggttttgttttgagttagaggatgtagtgtagatatttatttttatattgtttttttatagagtttttttttttttggggtgttgttgggtatagggtaggttgttaggaatttttagtaaaattatgtttgtttagaggtttgtggtttttttagagggtgttggggaaagagaggggatttgatttttttgatttttggaggaaaagtgtttggggttttttagggatatagttttggaagtttattttattttagtttaggttgtggtgaggtggggaggagagttaggagagggggagaggggttttgtgttttgtagaggtttttaattttggaggaaaaagattgggatatatttaagtgagttaaggtttgagttttatgtatttttatttatttggggtggtgtatagttagtttttgttgggtgtgagtatttgattaagggagtaagtggaatgaaaatttagttgggggggtttttattgatataattgttttgtagttgagtttttggatttttgggagatgtggagagtttggggttggtttttgttttgtagagtagattggattgttttaggtgtttggaatgtgtttgtattttgttttttggatttgtgggagatttgtgttttgtaagtttttttttttattttagtttgtttttatttatattttgttggtgagtgtgttattgtgaggtgtttttttttttgggaagggagtttttttttgtgtagatttgtattgtttttttttttgtttggttttgttttttaggggtagtttttgtagaaaggagatttttttttgggttgaagggttattagtttgtagttagtttagttttggattttgggagatgtttattattttgtggattttgatttgaaattttttttggttgtttattgtggagagtgtttttgtagagaggtttttaattgaaggagtttgggttttatattttgtttttaagtttgagtttttagggttgttttgtatgaggtgtagatgaatttgtgtttgtaaataagatagaaaattttaagtgttgtttgattttttttttttggggaatttgtattttgttttgggagtgtgtttagtgttttagtattaaattttttggttggggttggtagagtttagagttttgtttttttttaggtgtggttttttaatatttgtaatttaaatgttgtgttgtggttaaaattagttttggtagtgtgaatagagaattaaaagtaggtagtgaatgagaatagtttgtattttttttttttggtagatggggaggtgtaaattttgaggaattttagggtatttgttttaaatgtgggaaatttttgtgtgtattttgttttttttttttagtttgtgttaatgttttaaatggtgttgagttgtttaattttgttgttattatagaggttgttgtgttttaggggattaattgatgtgagatatataaaattttgtaattttataatataaattatagtatagtttttttggagagggttggaatatttgagtgagtttttgagaggaaaagaggagttttttagaggagaaatagagtatttttataatgtgttttaattgagaaattttgttttattgagtttttttttaagtggaattagaagtgttgggatgagagggaaaggatgggagtgtgtttaaaggtggatagtaggtttttatttttggtgggagtgagattggatggtattttttggaaaggtggtttgggttttggataaggttagaggtaggagtttatgatgtagagatgatatagtgtttttttgtgtgtgagtttatgaaggttattattgaggttttgtgtttgtaaaaggttgttatgttttatataagtttttatatttaatatagggattgattgggtatagggatttttttatattatatatgtaagtatgtatgttaattaaagatgtttgtgttaaagaaatggttaattttgttgaatttagaggaattgattaattatttaattaagtagaggaaatgtttgaatttaatttgtaatttagttgtttttttatataaaattatatatttttatttatatttgatgaatgaaaaaagaaattagtttatgattttaatttaaatatatgtttttaaaaatatattttttttagtttagttagtatataaattaattgagtttttttggttaagtatgatttagttgtgatatttaagagtgggagtggttgtttagatatttttttttttatgtgaaatttagattaatgagttattatttaataagttgtaggtagtttggttgggttggatttagatggtttgagttaaatttagattgtatttgtttaaaattttgtaaatttttagttatgtaaattttatttttaaaaatgttgggaagttattgtataagagtttaagttatattagtttttttgtgattatttgtagtttttggggaaagaatagaagaaaagaaaatgttagtttttgtgaggtggggttggtgttttaggggttttttttgaatattttgttttttttttaaaggttaaaaggaaggtagtggatatatattagaattttttttatttgtgaatggttgtaaggttggagaaggtggttagtgtattttaaggtttattatttttttttgtgtttttttttttgttttggtaggtttagttagtttaagttttgggtgttattttttaaatttttttgttaaattaattttatttatttgattggattatttgagaggtgttatttttttttgggttgttgtgattttgagggggtatttttataagagtttaggtattaggtggtgaaatagtttgtgtttttaaatttgttttttttagggtttttgggagattttagagtgtaggtttgtttggggagttttaggggtgggttttgagtggaagtgggtttattttttataggagtttaaattttataggaataagaatagtagtaaaataggataagagagtaggtagggagttgttaaggaaaggtgatttttgggaaggtaggttatttagaataaggtttttttggtgttggagagttggaagggggagtgggtatagaggatttggtttaggtgtgggggttattagtataagtagagttattttttagatttttttttagaagtagttgttttttagagaaattaggtgagggatagtttttgtatttttatatgttagttttggagatttgtttatttgtttttagttgtttttttttttgggtgagtttgggttaagtattaagttaggatagaagggtggtttttagttggtttttggtttattttgtttttttaatatttagggagtttgggtttagtataggtgtttttttagtgattggggtagaattaggatgtgtaatgtgattgtttttttttttttgttttttggtagagtttttgtttgtgttaatttatttattaggttttgtttgtgttatgtgtgtttttggtaggtttggggtggggaaaggtgaagtgttgggtatgtgagggtttgtgtattttagtttttatgatgtttttggttttttttaggtttgttgttgttgtatttaattttttttttttgggggttattttgaagaagttttagattttagatttagttttttagattttgtttttgagtttgtttggtgggtttgtaggttggtttttttttgtttagaggagagtgtagatatgtaatgtttgtttgttggttttgtttgttttatttttgttttttgtgtttttttgttttggtttttgtttataggttgggttggaatgttagttttaggagttgatggtggttttttgtttgttttggggaaggtgttgtttttttattggttttaattttttgtttggtgtttggggtttggttgtggggtttggtttttagttgagggtgtagggttggttaggtttgttttggttgaggtggagattttgtttttagggattgttgggtgtttttgttttgtgagtaatgagattgttgtgagtgaatggtttttattgagtttatttttttaagtgttattatgttaagttagagaagtgaggtgagtggaggggatgtagaggggttggaaaagttatttttttttggttttgtttttagataaaaatgggagtttggtttggtatttgggtgtttggtgtttttggggtgttttattgaggttttgtttgtaaaattagtgtttgtgttttgaagtgtatggtgtttggaagttgtttttttgtttgttttttttgaggtttttttttgtgtagtgagtttgagaaatatggaggattgttttttgtaagtgggtggttgtgggtgttttttgatttttgggtgaagttagagggaaaatggggtttttgggttagtgttttattttttattttgggagaaattaatgtttggagagggtttgtttgatttgtatagaaaggttgattttgagggtggtggttgtttgggggagaaagtggaggttttgggtttgtgggagtgtggtagttggggttggtattgtagaggagagatatgttattgttttgtatttttagaaagtgtgaggtgttgttttagttggggtaggtggttgaggttggtttttatgtgtgttttttgaagttttttgaaatattttgtggagttttgtgtgtatagaatttagtattgtttagtttttgggtagtttaattttttgtagttttattttagtttttttggttttttgaatggtgattttttttattgtttttttagagttgttttgtgtttgggtttattttggggggtttggtattttttagttatttttttttttatttattttttttttttttatttttttttttattttttattttttttttttttaggagagtgatttatgaatttttttttttttagttaattttagggtttagtttgtagattttgtgagggtaggtttttgtttattggtttgttaggtgttttggaggtgatgttttgttttttagagtttttgttgtagttatgaattggggtttgggttgtaggaaagtatagggttgaagtttagtgttttggggttatttatattgaggtagttagaggtaaagagttttaagaatttagaaaatattttttaggaagttgtttaattggtttttatgggataggtggagttattaatttgggatggttttgtaggaattaaagagtttagggttttttttttttttaatattatgtttaggagatttagagttgttggatttttttttttttgattggtgattattagagtttttagagttgtagaaaattttttttttaaaaaattaagtaagtgttaataagattttttataaatttttattagttttatttttttggggggtaggtagattgtggggtttgattttttgagatttggggaggatttttggtagatgtgtgtttagttagaatatttggtaaggatttttttaatgaagaaaaagtggaggaatttagttttagtgagaagaggtttttttattttgttttagatatattggatagagggtatattttgattagagttatgtttagtggttaggaggttagtttagtatttttttttttattatttttgttttgggtgggggggtaatttttttgggagtagttgtgggaattgttgttttttattttagtttagttagtattttgaagtttgtaggggaaggatagtatgtgggatggatattggggaaggagttttgtaaggttagggtgtaatttttaggttttaggtggtttggtaggttatgttgttttggagatgtttgttagattttttaagtttatttagggtttggtagtaatttgttggttgtttttgtgggggtttgggttgttgagtatggtgtagttgtttagggttaattagttttagggtgtttgtgttaggttgtggtttttttgttttttttgtattgagggtatttatggtgtgtaaatgtttttgtatttttagagttgttttattggatgtttttaggaatttatatatttttataaaaatgtattttaaatgatggataggtgagtttggggtaataatgggtgtttggtgggtagataagagtaaatgggaaggagtttgagggaggagggggaagagaagaggaaatagaatttttagttggatattttgataatagttggaaggaaagtttagaaaagatgaagagagaggaggggagaaattaattggggtttttatttttgttgttggatttttaatttttgttttaaatgggttttgttttttggtaaaattagtttaaaggattttaaaataaagaaaatgagatgattggtttgggagttttttaattagagtagagaagttagaggggggtgggtgatttggttttgaagttttagttgaatagttattttttttttttttggtaaaaaggatttttttagaatttttgaggtttttggatttttttttttgtaaatggagttgtatattgtatttttttgtttttttggattgttaagtatgttttatgagggttgttgtttttgggtggaatgtggttgtatgtatgtgtttttttgtatatgtatatatatgtatatttataataagtgtttgtaggaggagtgttttgtgtgttagttttgtgtttaagataggaagttgttgggttattgagttaaatgggagtgatattatttttttttattagtaaggaaagtggattataaaagtttttttgtattttggtagtttatttaatattatttatgtattttgtgtaaggaattgtgggattttgttttatggtaaataatatggaaattttaaaaatagtgatttttttgtgtgtgtttatttatgtgttttggggtgatttggtggggttgttgttgggtgatttatatttttgaattgtgaagtgatagggaaagtgtgggtgagtgtaggagatgtggttgggggtttttttgggtttttgggtttttgtatttggagtgggggatgtggttgttttaaggggaggaggggtggtgggttgtttttgttatttagtggtggttggagtgttatgtgggtgtgtggtgttgtggttattggtttgaggtatgtgtttaggagattggtttgtgatgttatttgagggggttttgttaaaaataagaataaaaatttagagtgaaagtgttttaggttgtgttgagtggtttggaaatttttgagtttgtgtggaggttgaggtggtgagggtggtggatggttggggagtgtgggtggtttagtttggtttggttgggttttggttttgtgttttttatttatgtgatttgggttgtggagttttgtggggtttggtgggggtgtggttgtatgttggtggggtgttttggtttgtagtggggtggtggttgtgaggagggggtttttatgtgtgtgtgggtggtggtgggtgtgttgattgtgggtgtttggtatttttgagggttggttagggtgtgtgggtggggatggttgggtggtggtggtggttggagttggtttgggtgggtgtgagtgttggggaatgtgttgtttgtatgtgtgtagtttttgttttgggtggtttaggtggtggtgttggagtttgaggtggttggatgtggagaggagtggggagtttgggaggtggtttgtgtttttgttggattattgtgattgtttagattttggttgtgtggtgaagttgaggatttggttttgttgaattttttattgtttgggtgagtggggtggtttgtggtgtttttaatttagtttgtggatttaaaggtggttttgtgttgagtgtggttggtgatttgtaggattttagttttggttgtggttgttgtgtatgtttttggaagatttggtggggtgggggtgtgggggtttttgtgtgtgttgtgggagggttgaaggttgatttggaagggtgtttttggagaattagtgtgggatttattgtgaatagtatggaggagaatgattttaagtttggtgaagtagtggtggtggtggagggatagtggtagttggaatttagttttggtggtggtttgggtggtggtggtggtagtagtttgggtgaagtggatattgggtgttggtgggttttgatgttgtttgtggttttgtaggtgtttggtaattattagtatttgtattgtattattaatttttttattgataatattttgtggtttgagtttggttggtgaaaggatgtggggatttgttgtgtgggtgtgggaggaggaaggggtggtggagttggtggtgaaggtggtgtgagtggtgtggagggaggtggtggtgtgggtggtttggagtagtttttgggtttgggtttttgagagttttggtagaatttgttatgtgtgtttggtgtgggtgggttgtttttagttgttggtagtgattttttgggtgatggggaaggtggttttaagatgtttttgttgtatggtggtgttaagaaaggtggtgattttggtggttttttggatgggttgtttaaggtttgtggtttgggtggtggtgatttgttggtgagtttggatttggatagtttgtaagttggtgttaatttgggtgtgtagtttatgttttggttggtgtgggtttattgtatgtgttatttggattggttttttttaggtgagtttgtggggattatgtgttttggtttgttgtggggaggtttgtggagttggggggtggtgttggtgtgggaatttattgggaggaaaatattttgaattttttttgtgtatatgtataaagatttatgtgatattgtgtgaagttgatgttggtttgggtagtggttaggagtttagtggtaggattgatttgttagggggtatagattttttaggattgtagaagggattttttttttttttttgttttttttttttttttttttttttttgttttttttttttgttttttattttgttttggtgtatttttttttagtttttagtttatgttttttttattgtagttttttttggtgggaatgtggtggttggaagatgggtttggaagtgtatatttttatttttttttttatgattttttaatttaggttaggttggggatgtatgttttagtttattttagatttgttttattatttggttattttggttgtgtttggggaagaaaaggtgaggttttttgttgttttgttttttgttttttgggtttgtgttgattggtgggatttaggaggatgtatatagggaaggaggaaaataaaggtgttttttttttttggttttattttgtttgttagtgttagtttgtagtggtggggtttagttttttttttgtatatagtgaggataagggaggtagttgttttttttggtatttgttatttttaaatagaaaggatttttttttagggttttttgggggttgttgatgggaaagaggtagtatttgtaggggttttgtagagatgttggatatatttttttatagatttgtgattttaaaaaattaagtttatgtttttgtagaaattattaattgtattttatgtgggtttgtggttgggaattgttattagaagtggattgtttgattttgagttggtagtggatttttgttgtttttaaatttttaattattttgtgggggttatttgtttagattatagtaggagtgagttaatttttgggttgttattttgtagaattatgtgtgtatatttttgatgaaatttagattttttagttagatttgaaatttgttttattgtttttgttttttttttttgttaatatttaattaatatataggtttataatgttgggtgaggagatttggttgggttttgtgtggtgtgggagtttgttgagttagtttttaatggtttgggagttgggtagtattgtttggtttggtttggtttggtttagtttagtttagtttaagttgtttatttttatgggttttaaaatatttttgtaagataatgtttttgttttttggtttttttgaaagaaaggggagagagagtttttttggggaggtttgattttgtttttgagatttttaagtatttgttttttgaaagaaaattaagaaaaaaatttaaaaattattattttagggaaatttattgttataaaatggtgtttttttgtgggttgttttatgagtgtattaataagagttttaggattagaagagtttgggggtagagttttggggaagggagtggttggaaatttagatagagatgggttttgggagtaggaggttggggttttttttggagttttgtgttttattttttattattgttttggagggttaattttatttttaaatttgtatttatttttattaaagttaggtttattggtttggagttttgggtgtgagtaagataggtattgagtgtgtatgtgtgtatggggtgggtgtttaagtatagggtgtgtgtttttatgggtggtgagtttgtttatgggttgttttaaaagttgtttttggtgtttttgaggtggtgtttatagattttttttttttaggtttgttttttggagagagtataagatttatttggttatgagggagtgtttggtatttattttgggtttttagtttgttttttattttttgttgggtatagttttagtattttagttgatttttttgatttgggtagggtgtagttttagggtttttaaggagatttatattttttttttttttagtgtgtttggtagttttttggttttgaagggtggggggtttttagttttttttagttatagggatttgtgatgaagttggggttagatgttttttaaagttgatttatatattgtataaattgaaatttagaggtgaggttattattttttgttagtggttttgtttttttttttttttatagggaatgttagggggttgagttttttattattaaaaagaaattgatgatatttttttttttttgtttttttttttttgttttttttttatggatagtaggttttagaagttttatagtgattttgtttaaaatttggggtaggtttatagggagaaggttaggttaggtttataagtttgaattttagttgggaggtatagtggggagggttagaagtggatttggataaggttagttgggttattttgttgtttatagtgaagtagttttatgtttggggaaagggtggtgtagttaatatttttgtagagttaggtttttttttttggataggaaatttgggagatttttagtgggtgaaggatttatttattgtgagtagtttagtgtttttttttattaaggagggaagtatatgtattgatttttttttaaaggaatgaatttgggtttatagagtttttggttgggagttatagaggagtttgggtggaggtagatattttgggttttttttgtttttagggtttatttgtttttgatttttatagtttttggtattttgtggggtatttttatgagggtttttattatagtttttagggtgttttttgtttttgtgattgttttgtagttttttttagtttttttttttttttttttttttagtatttattgttatttttgtttttgaatagagagttttagaaaggattaggaaaaattaggttagaaagtgtggggagttttgtttatatttaggagttttatttttatttagagattttttatttgtggttagtttgtttattaggtttgttttatagttttatttatattatatgtagtttttttttattaagtggtggaggtttgtgttgagtttatgtttagtttgaagtttagttttatatttggtggtttagttttgagtggttttgggtgagttattttttttttggggttttagaatttttatttggtgtttattgggtggtatatttttgggtaatttgatttttttttgtttattgtatttatttaggttttaggttttgaaaattaaagaagaagaatttgaataaagaggataagtggttgtgtatggtttttattgttgagtagttgtagaggtttaaggttgagttttagattaataggtatttgatggagtagtggtgttagagtttggtgtaggagttgagttttaatgagttatagattaagatttggttttagaataagtgtgttaagattaagaaggttatgggtaataagaatatgttggttgtgtattttatggtatagggtttgtataattattttattatagttaaggagggtaagttggatagtgagtagggtggggggtatggaggttaggttttagtttgtgttaaataatgtaataatttaaaattataaagggttagtgtataaagattatattagtattaatagtgaaaatattgtgtattagttaaggttttgaaatattttatgtatatattatttataggtggtataaaatttaaaatatttgattataaaatatttttttgagttttttgtgtttatgagattatgttaattttatgggttttttttttttttgtgaagggggttgtttagggttttatttttttttaattttttaagttttattatatgatattggatatttttttattattttaaaagaagaaaaaattaaaataatttgttgaagtttaaagattttttattgttgtattttatataattgtgaattgaataaatagtttttatttggtttatgatttttgttattttgtttgtgttggtttggtgaggatagtaggaggggtttatattttaagtttggattagttattttaaggttttggggagtttaggggatttggtgggagagaggggatttttagggtttttgggttagttttgggatttggttttgggaagtagtttagtgtattttaggtttgttttgggaagttggttttatgtttattagtagttgtttaggtttgtagttttatttggttttttttttttatttttttgtatttaatttttttttttttttttttttttttttttttttttttttttttttttttttgttttttttttttttttttttttttttttttttttttttttttttttttttttttttttttttttttttttttttttattaagggtttaattgtgtgtatatattgtttgtgtttgtggtttgtgttgttgtttttagttttattgtagttttgttgtaggtttaatttttttgttttgggtattgtttttatgtagaagtgttttgaggttttggggttaaaggtttggggtgtgtggtttaaagtttaagagtggtggggtgattttttttttggtttggttttaggaattttttgtgattttattagttattatgggtgttagttagggttttagaaatgaggttatggtttattgtttttgggtgggtagaaggttttgtagagggagatggtattatttattttttttttttttttttttttttttttattttttttttttttttttttatttttttttttttttggagtggttgtttttgttatagagaatatttttttaagataaatatgtgtgtttatatatatgtttgtatgtatgtgaatatatatatatatatatatatattaggtgtgtttgagtttatagttttgaaatatgtggttattttgttttttaaaagaatttagaattttttaggatttagaagaaggaagaaagtgtgtaaataattattttttattattattttttgtttttttttgttttttaaaatatatattttatttttgaaggtgtggtatagtgtaaattaaatatatttaatatattttttattaagtatttatatatgtatataaataaatatattatttatatataatgttat

SEQ ID NO: 145 - DNA, 16197 bp, Artificial Sequence
  chemically treated genomic DNA (Homo sapiens)
gtggtgttatatatagataatgtgtttgtttatatatatatataggtatttggtgggaaatatattgaatatatttaatttatattgtattatatttttaaaaataaaatgtatattttaaaaaataagaaaagataaaaagtgatgataagaaatgattatttatatattttttttttttttttagattttggaggattttgagtttttttgaaagataaggtagttatatgttttagaattgtggatttaaatatgtttggtgtgtgtgtgtgtgtgtgtgtgtttatatgtatgtagatatatgtgtaaatatatatatttattttggaagaatgttttttatagtagaagtagttattttaagaaaagaaaaaaataaaggaaaaaaagaaaaaaatagggaagaaaagaaaaaggaaaggaagatagatgatgttatttttttttatagagttttttgtttgtttagaaatagtgagttatggttttatttttgggattttggttggtatttatgatggttggtggagttataggaaatttttggggttaagttaaaaggagggttgttttattgtttttgggttttaggttatatattttaggtttttagttttagaattttgaagtgtttttgtatggaggtagtgtttagggtaggagggttaggtttgtggtaggattgtggtgggattggggatagtgatatagattatagatgtagatgatgtatgtatatggttgggtttttggtgaggaggaggaggaaagagaaggaggaggaggaaggaaggaggaggaggagaagaaaaagaagaagaaaggaggagtaggaggaaggaggaaggaggaagaggaggaaaaaggagaaggaggagggagttaggtgtaggagggtgaggagagggagttgggtgaggttgtgggtttgggtggttgttggtgagtatggagttgattttttagagtaggtttggggtatgttgggttgttttttagggttaaattttagaattggtttaaggattttggaagtttttttttttttattaggttttttaagttttttaaggttttgaggtggttggtttaggtttgaggtgtgggttttttttgttgtttttattaagttaatataaataaagtggtagaagttatagattaaataggagttatttatttggtttatagttgtgtgaaatgtagtaataaaaaatttttggattttagtaagttgttttaattttttttttttttggaataataaaaaagtgtttaatgttatataatggagtttaggggattaaaaaaaggtgaaattttaagtagttttttttgtaaaaaagaaaaaaatttataaaattagtataattttataaatataaaaaatttaaaaaaatattttatagttagatattttggattttatattatttgtaaatgatatatatatagaatattttagaattttagttaatatataatatttttattattaatgttggtataatttttatatattggttttttatgattttaaattattgtattgtttagtgtggattgagatttggtttttatgttttttgttttatttgttgtttgatttgttttttttggttgtggtggagtggttgtataagttttgtgttatgaggtgtatggttagtgtgtttttgttgtttgtggtttttttgattttggtgtgtttgttttggaattaaattttgatttgtgatttgttgaggtttagtttttgtgttaggttttggtgttgttgttttgttaggtatttgttggtttggaatttggttttgagtttttgtagttgtttggtggtaaaggttgtgtgtggttgtttgttttttttgtttgggttttttttttttggtttttgagatttgggatttgggtagatatggtggatagagagaagttaggttatttagaggtgtgttatttaataggtattgggtaaggattttggggttttaagagggaagtgatttgtttaaggttatttgaggttgaattgttagatgtggggttagattttggattgggtatgggtttaatgtggatttttattatttggtgagggaggattgtgtgtgatgtaagtgggattatggggtaggtttagtgggtaggttgattataaatgaggggtttttagataaaagtaaaatttttggatgtaagtaaaattttttatattttttggtttggttttttttagttttttttgaggttttttgtttaggaatagggatggtggtaggtgttgagagagaggggaggagagaagattgggaaaggttgtagggtggttatagaagtaggaggtgttttgagggttatgatggggatttttatggggatattttatagggtgttaagggttgtgggaattaggggtaggtgggttttgaggataggaggggtttagagtgtttgtttttatttaagtttttttatgatttttagttaagggttttgtggatttaagtttatttttttaaggaagagttagtgtatgtatttttttttttggtggggaggggtattgagttatttatagtgggtgagttttttatttattggaaattttttaggttttttgtttaggagaggggatttggttttataagggtgttgattgtattattttttttttagatatgggattgttttattgtgggtagtagggtagtttagttgattttgtttaggtttatttttgattttttttattgtgttttttaattgggatttagatttatgaatttgatttggttttttttttgtggatttgttttaggttttggatagggttgttgtaaggtttttaggatttgttatttatggggaaagggtagagggaggagagtagaaggagggaagtgttattagtttttttttggtgataagaggtttaattttttggtgttttttgtgggggaagaagggggtaaggttattggtagggagtggtgattttgtttttgggttttaatttgtgtggtgtatgaattggttttagggagtatttggttttagttttattataggtttttgtggttggagaaggttgggggttttttattttttagggttggagagttgttgggtatattgaggagaagaggaatgtggatttttttggaggttttgggattgtattttgtttaggttaggagagttaattagggtgttggggttgtgtttagtaagaggtgggggatgaattggaggtttagggtgaatgttaagtatttttttatggttaagtgagttttgtgttttttttaggagataggtttggagaaagaggatttgtgggtattattttaggagtattaagggtagtttttaaagtaatttataggtaggtttattatttatgagagtatatattttatatttgggtatttattttatgtatatgtatatatttagtgtttgttttgtttatgtttagggttttaggttagtgggtttggttttggtaggggtaggtgtagatttggagatggggttggttttttggaatggtggtgggggatggggtataaggttttaggagaggttttagttttttgtttttagagtttatttttgtttgggtttttaattatttttttttttagaattttatttttaaatttttttggttttggggtttttgttaatgtatttatgaagtagtttgtaaaaggatattattttatggtaataaatttttttaaaataataatttttaggttttttttttgatttttttttaaaagataaatatttaggagttttagaaatagaattaaatttttttaagaaaattttttttttttttttttttggagaaattaaagaatagaaatattattttgtagggatattttaaagtttatgaagataggtgatttgggttgggttgagttgggttgggttaggttgggttgggtggtgttgtttagtttttgggttgttgggggttggtttagtgaatttttgtgttgtataaagtttggttgagtttttttgtttggtattgtgagtttgtatgttaattaaatattaataaaggaggaagatgagaataatggagtaaattttagatttagttgagaaatttgaattttattagaaatatgtatgtatagttttgtgggatggtggtttaagggttggtttatttttgttgtgatttgggtaaatgatttttgtaaaatagttgagggtttgggggtagtggggatttgttgttagtttggggttaaatagtttatttttaatggtggtttttagttgtagatttgtatggaatgtagttgatgatttttataaggatatggatttagttttttaaaattgtagatttatgaaaaaatatatttagtatttttgtagggtttttgtgaatgttgttttttttttattagtagtttttaggaaattttgagagaaggttttttttatttggggatggtaggtgttgggagggatggttgttttttttgtttttgttgtgtgtaggaagggggttgagttttattattgtgggttggtgttggtaaataaagtggagttaaggggaaagggtgtttttatttttttttttttttgtgtgtatttttttgagttttattggttagtgtaggtttgaggggtagaaggtagagtggtaaagggttttgtttttttttttttgagtatagttgggataattggatggtaggataagtttggggtgggttggggtatgtgtttttggtttggtttgagttggaagattgtagggaaggggatgagagtgtgtatttttgggtttattttttagttattatgtttttattaaaaaaaattatagtgggggagatatgggttaggggttgggaagagatgtgttaaggtggggtggaagatagagaggggagatagggagagaggaaggagagagagagatagagaaagaaagaaggttttttttgtggttttaagaagtttgtattttttagtgaattagttttgttgttggatttttggttgttgtttgggttggtgttagttttatataatgttgtgtgagtttttgtgtgtgtgtgtgggggaggtttgagatgttttttttttggtaagtttttgtgttagtattgttttttagttttgtgggtttttttgtggtgagttgggatgtgtggtttttgtgggtttatttgaagaaggttggtttgagtagtgtgtatagtagatttatgttggttagagtatgggttgtgtgtttaggttggtgttggtttgtgagttgtttgagtttgagtttattgataggttgttgttgtttaagttgtgggttttgagtgatttgtttagggggttgttggggttgttgttttttttggtgttattgtgtagtgagagtgttttggagttgttttttttgttatttggagagttgttgttggtggttgggagtggtttgtttgtgttgggtgtatatggtgggttttgttggggtttttgggagtttgagtttaagagttgttttgagttgtttgtgttgttgtttttttttgtattgtttgtgttgtttttgttgttggttttgttgtttttttttttttttgtgtttgtatagtaggtttttgtgtttttttgttggttgaatttgggttgtaggatgttgttgatgaagaagttggtgatgtggtgtgggtgttggtggttgttgggtgtttgtaggattgtgggtagtattagagtttgttggtgtttggtgtttgttttgtttgggttgttattgttgttgttgtttgagttgttgttggggttggattttggttgttgttgtttttttattgttgttgttgttttgttaggtttggggttatttttttttatgttgtttatagtaaattttatattggttttttggggatgtttttttaaattagtttttggtttttttgtggtgtatatggagatttttgtgtttttattttgttgagttttttgagggtgtgtgtggtggttgtggttagggttgaggttttataagttgttggttgtgtttggtgtggagttatttttgaatttatgaattgggttagaaatattatgagttgttttgtttgtttagatgatgagagatttaatagagttaagtttttgattttgttgtgtagttggggtttagatagttgtagtggtttggtggggatgtgggttgttttttgggttttttgtttttttttgtgtttggttgttttgggttttggtgttgttgtttgggttgtttggggtgagagttgtgtgtatgtaggtagtgtgttttttggtgtttatgtttgtttgggttggttttggttgttgttgttgtttggttgtttttgtttgtatgttttagttggtttttgagggtgttgggtgtttgtggttagtgtgtttgttattgtttgtatgtatatggaggttttttttttgtggttgttgttttgttgtgggttggggtgttttattggtgtgtggttgtgtttttgttgagttttgtagagttttgtggtttgagttgtatgggtgagagatgtgaggttagggtttggttgggttgggttgggttgtttgtgttttttggttgtttgttgtttttgttgttttggtttttgtgtgggtttggaaatttttaggttatttggtgtaatttgagatatttttattttggatttttgtttttatttttaatagagtttttttgagtgatgttgtaggttggttttttggatatgtgttttgggttaatggttgtggtgttgtgtgtttatgtgatgttttggttgttgttgggtgataggagtagtttgttgttttttttttttttaaagtggttgtgttttttgttttgggtgtgggagtttaggaatttggagagatttttgattgtgttttttgtgtttgtttgtgttttttttgttgttttgtggtttaggggtgtgagttatttggtgatagttttgttaggttattttggggtgtgtaggtggatatgtataggaagattgttatttttaagatttttatattgtttattgtggggtgaaattttataattttttgtataaaatgtataaataatattaaatgagttgttgagatataaagggatttttgtggtttgttttttttgttgatggagaggaatagtgttatttttatttgatttggtaatttggtagttttttgttttaaatgtagagttggtgtgtaggatattttttttgtagatatttattgtaagtgtgtgtgtgtgtgtgtgtgtagggaggtgtgtgtatatggttgtattttatttggggatagtgatttttatgaaatatgtttagtgatttgaaagagtgggggaatgtagtatgtggttttatttgtgaagggagaaatttaggagttttggaggttttaaaggaattttttttgttaaggagaggaggggtgattgtttagttaagattttaaaattaagttgtttgtttttttttaatttttttattttgattgaggagtttttagattggttattttgttttttttgttttaaaattttttaaattaattttgttggagagtagggtttatttgaaatgagaattaggaatttaatggtaagggtgggagttttagttggtttttttttttttttttttttattttttttagattttttttttagttgttgttagaatgtttaattggaagttttgttttttttttttttttttttttttttttgggtttttttttatttgtttttgtttatttattaaatatttgttgttattttaggtttgtttgtttattatttaaaatgtatttttatggaaatgtgtgaatttttggaaatatttgatagggtagttttgggggtgtgggagtatttgtatgttatgagtatttttagtgtgggggaggtggggaggttgtagtttggtatggatattttagggttgattggttttgggtagttgtattgtgtttagtaatttagatttttgtagaggtagttagtaggttgttgttaggttttgagtgaatttggggagtttggtaagtatttttgaggtagtgtggtttgttaggttatttggggtttgaaggttgtattttggttttgtgaagttttttttttagtgtttattttatgtgttgttttttttttgtaggttttagagtgttggttgggttgggatgagaaatgatagtttttatagttgtttttaggaaaattatttttttatttaggatgggaatggtgggggaggaggtgttgggttggttttttggttattggatgtggttttggttagagtgtgttttttgtttggtgtgtttagggtagggtggggaagtttttttttgttggggttggatttttttattttttttttattggaggagtttttattaaatgttttggttaggtatatatttgttaggggttttttttgagttttaaaaaattaaattttatagtttatttgttttttgggaaaatagggttggtgagagtttgtgggaagttttattgatgtttatttggttttttggggggagaattttttgtaattttggaaattttgatgattattagttaggaaagggagggtttaatgattttgggttttttgaatatgatattggggggaggaggggttttgagttttttggtttttgtaaaattattttaggttaatggttttatttgttttatgaaagttaattaggtggttttttgagaagtattttttgaatttttgggattttttgtttttgattgttttagtataaatggttttaagatgttgggttttagttttgtgtttttttgtgatttagattttaatttgtggttgtaatagagattttgggaagtagagtgttatttttagggtgtttggtgggttggtgggtagagatttgtttttgtagggtttgtgggttgggttttggggttggttggaggaagaggaatttgtgggttgtttttttggaaaggaggaaggtgagaggtggagggaggaataggagaaagagaaataaatgaagagagagataattagagggtattgggttttttagagtggatttaaatatgaaataattttgggaaagtggtaagaggggttattgtttaaagggttggggaagttgggatggggttgtagaaagttgagttgtttaggggttgggtggtgttgagttttatatatatggaattttgtaaggtgttttaggaagttttgagaagtgtgtatgaggattggttttggttgtttgttttagttgggatggtgttttgtgttttttggggatgtggggtagtggtgtgttttttttttgtgatgttagttttggttgttgtgtttttgtgagtttagagtttttgtttttttttttgaatgattgttgtttttaaggttggtttttttgtgtggattagatgagttttttttggatattagttttttttgggatggaaagtggggtattgatttgggaattttgttttttttttagttttatttaggaattggagagtgtttgtgattatttgtttgtggaggatggttttttatattttttaggtttgttgtataaagaggggttttggagagggtgagtaggaaagtagtttttagatgttgtgtgttttaggatatggatgttagttttgtaaataaaattttagtgaagtgttttggagatattgggtgtttggatgttgagttaggtttttgtttttatttgaaaatgaggttagagaagggtgatttttttggtttttttgtgttttttttatttgttttgtttttttagtttgatgtggtgatatttggaaaaatggatttaatgaaagttgtttgtttgtggtggttttgttatttgtggggtagagatgtttaataatttttgagagtgagatttttattttagttaaagtaggtttggttagttttgtgtttttggttgggagttgagttttgtagttaagttttaggtgttgggtggggaattggggttgataggagagtaatattttttttggggtgagtagagagttattgttggtttttggggttgatgttttgatttggtttgtagataaaggttgaaatgaaggggtgtggggagtaggggtggggtgggtggggttaatgggtggatattgtgtgtttgtgtttttttttgggtgaaggaggattggtttataggtttattgggtgagtttggggatggggtttgggaggttgggtttagggtttgagatttttttagaataatttttggaaggagggggttaaatgtggtagtggtgggtttgaaaagggttaggagtgttgtaggaattggggtgtataggtttttgtgtgtttagtgttttgtttttttttgttttaggtttgttaggggtgtgtgtggtgtgggtagagtttggtgggtgggttggtgtggatagaagttttgttggggagtggggaggggggggtagttgtattgtatgttttggttttgttttgattgttggagaagtgtttgtgttgagtttaagttttttaggtgttggggaagtagagtgggttaggagttgattggggattgtttttttgttttgatttgatatttagtttaggtttgtttggggaggggggtggttgggggtaggtgggtagatttttagagttggtgtgtaaagatgtagaaattgttttttatttggtttttttggaaagtagttgtttttgaaggagaatttgaaggatggttttatttgtgttagtaatttttatatttaaattaggttttttgtgtttgtttttttttttggttttttagtgttaggggagttttattttgggtgatttgtttttttaagaattgtttttttttggtagttttttgtttgtttttttgttttgttttattgttgtttttatttttataaaatttggatttttgtggaaggtgggtttatttttatttaaggtttatttttgagattttttagatagatttgtattttggagttttttgggagttttgggaggggtaggtttgggagtatagattgttttattatttaatgtttggatttttatgaaaatgtttttttaaaattatagtaatttagaagaaagtggtattttttaaataatttagttaaataagtaaaattagtttggtaaaggaatttgaagaatggtatttaaggtttgagttggttaagtttattaaaataggaaggaaaatatagaaaaggataatgagttttgaagtatattagttattttttttagttttgtgattatttatagatggaagaaattttagtatgtatttattgttttttttttgatttttggaaagaaaataagatgtttaaaaggaatttttgaaatattagttttattttatagaggttgatattttttttttttttattttttttttaaaggttataagtaattatagagaggttagtgtagtttaaatttttatatagtgattttttagtatttttggaaataggatttgtgtagttagaggtttatagaattttaggtaagtataatttagatttaatttaaattatttggatttagtttagttaaattatttatagtttgttagatgataatttattagtttaggttttatgtgaggaagaaaatatttaaataattatttttgtttttaaatattataattgaattatgtttaattaggagaatttaattagtttatatattggttaagttgggggaaatatatttttaaaaatatatgtttaagttaaagttatgaattgatttttttttttatttattaaatataaataaagatatatagttttatataaaaaggtaattaaattgtgaattaaatttaaatattttttttatttagttaaatgattgattagtttttttgagtttaataaagttggttgtttttttagtatgagtatttttaattgatatatatgtttatatgtatggtatggggggatttttgtatttaattaatttttgtgttgagtatagaagtttgtgtgaagtgtggtgattttttataagtataaagttttagtagtgatttttgtggatttatatgtggaggggtattgtgttatttttgtattatggatttttgtttttagttttgtttaaggtttaaattatttttttgggggatgttgtttagttttatttttattagggatggggatttgttgtttatttttggatgtatttttatttttttttttttattttagtatttttggttttatttaaagaaaagtttagtagaataagattttttagttagggtatattatagaagtgttttgttttttttttaaaaaattttttttttttttttggaaatttatttaaatattttagttttttttagaaaggttgtgttatagtttatgttatggagttgtagggttttgtgtgttttatattagttaattttttaagatataatagtttttgtgatgatggtaaagttgagtaatttgatattatttggagtattaatataggttgggaggaagaaatgggatatgtgtgaagattttttatgtttggagtgaatgttttagaattttttgggatttatatttttttgtttattaggaaggagaaatgtgagttgtttttatttattgtttgtttttagttttttgtttgtattgttagggttaattttggttgtggtgtaatatttgggttatagatgttagggggttgtgtttagggggaagtgggattttgagttttgttagttttggttagaaagtttggtattaaggtgttgggtatgtttttaggataaagtgtgggttttttaaaagaggaaggttgggtggtatttagggttttttgttttgtttgtagatataagtttatttgtattttgtgtaaagtagttttgaaagtttaggtttgaagataaaatgtggagtttaggtttttttgattgaaaatttttttatgaggatattttttgtagtgggtggttagaaaggattttggattaagatttgtagagtggtgagtattttttagggtttggggttgaattgattgtaggttggtagttttttggtttggaggagaattttttttttgtagaaattatttttggaaaataaaattgagtgaaaagaagggtaatgtgggtttgtgtggaagggagttttttttttggggaaggaggtgttttgtggtggtatatttgttggtgggatgtaggtaggggtagattagggtgagaagggggatttgtggaatatgggttttttgtgggtttgagggatagggtgtaggtgtattttaggtatttagggtagtttagtttgttttgtggagtgggagttggttttaggttttttatattttttaggaatttagaagtttgattgtgggatagttgtgttgatggggatttttttagttggatttttattttatttgtttttttgattgagtgtttatgtttggtaggagttggttgtgtgttgttttgggtgggtggaggtgtgtggggtttgggttttggtttgtttgggtgtgttttagttttttttttttagaattaaaggtttttgtagggtgtagagttttttttttttttttttaatttttttttttattttgttgtggtttaagttaagatgaggtgagtttttagggttgtgtttttaggaggttttgagtattttttttttgagggttgaagaaattaggttttttttttttttttagtgttttttgaggaagttgtgaatttttgagtgagtgtggttttattggggatttttagtgatttgttttgtgtttagtgatgttttaaggggagaggagttttgtggaggggtggtgtgggggtgggtgtttatattatattttttggtttggagtaggatttggtgatgtgttttggttgagtttttgttttttaggaatgtgggtgttttgggttttgttgggatttttggtttgattggagggtttgggagtgggagtttggatttaataggtatttggatttaggagttagattttttggttttgaatgttttttttggagtgaaagtttgttttttttttttttaagttttttgtgggttgggaggtgaagggagtgatagaagttgggttttttttgtagtgtttaatgttttgggttttttgggttttgggatgtggtttgggtgtgtggagggatggttgggggtgtagatttgtgaatgaattttggagttttttgtagtttatagattagaggttgtgattgttttattgatgtggtttaatgagttgttgtaataagttttgagtgatgaaatggaggtatggtttggattttgtggtattgtgttgtgtagggttggatgggggaggggttgagttattgtagtaattttaaagtttgtgttggggtttagtaatgggtgggttttttttgggttgtatggtttttaagggttttttttgatttttattgttattttgttggaatgtttagaggtgtttttagtttaagtgatggagattttgatttttagttgtttttgtgttttttgtttgtgtgtttttggtgttttttttgggatttggggggtgattatattttgagatttaatttggttatttttgggtgtgggtttttattgttttttgggttggttggatttgttttttaagtagttgttttatttattatttgttgttagttttttttttaaaatttaagtttttggttgtttttttgttgttttttgttttttgttttttgttttttgtgtgaggggaggggagggggaggaaggagtggatatttatgtgtgtttgggaggggtttgtattgtttttttgtttttttagtagaggttttgggttttttttttagagggaaattggtgagtagatattaagtgatgtgagttttggttttttttttgttgggggatttttgtgtgttttagaagtgtatttggaagtaattttttttgtgtaattgttgttttttaagtatttttagtatttttatattttttaaatatttgtataattttgtgttgttttttggaggattttggagatggggaggggatgatggggtgttgtgggggtagggaaggagagaggttaggggttatgtaggattatggtttggtttggtgattttttttattttttgtggtttagggaggggatttgtagtgagggttttagattttttttgtaaaattgaattttgggggagggtttgtgttttatgaagtatggggaaggtttaaatgatgaatatttatgagtggttgggagtggaagatggtaggattgatgggtttgggagggaagatgggtgtgtgtttttagtgattatggtatgaggtggtgttttgttttgtattatgttataatttaattaggtttttgtttttttgtgtttgaatagggtgggtttatttgggtggtgagtttgagtttagtgtagttttagtttggtgttttttttttgtttgttggggaagaggtgggaaattttttttgttgtgttttggtttttattgtaggtttttgagaataaatttttttagggagattgaattgtttttattttttgttttagttttaagagggattttttgaaaatatggtagttaagaatagggtgaaaatgtaagtttgaggtttttttttttatttttttttgttttttgtttttttatttttatattttttattagtttagaggggtttagttgtaattattattattgttatttttatggtgttgatgattgttattatttttttttagttttagttgttttttggatgtttttattggaaggttgatgagtatttttaattttatgtgtttattttagagtatttttgattttgttatttttgttgttttgatttgtgtttttttagttttttttagttatttagttggttattttttaggagatatttttgattttttattttttttttagagttattttttgttttttagtaaggtttgttggttttgtttttatgttttttttatagtttttttatatttttgtgttttttattagtttttaagttttttttttttttatttgtaggg

SEQ ID NO: 146 - DNA, 2609 bp, Artificial Sequence
  chemically treated genomic DNA (Homo sapiens)
tgtagattagagatgattatagattttttttagtgtggattaaagggattgaattgaatgttttagtttaatgatttaatttttgttatatttatagggatgtgaattttgattttataagtaggtgtgtatgtgtatttagatatttatataaagttgtgtggagggatgaaaagattaattatttgattgatgaggataggtttgatttttttgattattttagtgtgttagtgtatatttttggttgggtttagtgttttaagaaattttggaattttagttgttaatttttgtttttttattatgattttttaaagatattttatttgtttattggggtgaagagaaatgggattaggtgttagggtggtgggattttgtttagggttttgattttgtgttagggttttagattagttggtttttgaaggtttttttatttattttatataagaggaaataaagattttttagtttaaggttttagggttgttttttgattttggttagtttgtaggaagaggaaataataaaataaaggaattgttaatttgttgggtattatattttttagttttaatttttgattttggattgttagggttattttttttatgttgattttgttttttttaaatgaaaatatgttaataaaagtatattttggatataaaatttaagtatgtattttttttggggaggttagagttgaggtgtattttggaagatgagaattttgtttttatgaattgggtaatatttaggtattgttaggtattttgatagattttttagatattttttttttttttttttatattttttttttattaaaatagttattgttttgaaatttattagaataatgatgttttaaaaataaaggtgtagtaagtatttttttttttgttgttgtgggttgaattatggatgtttgtgggttgtttagttttgatggtttgtagggggtgtgtgttgtagttgtagtatagtttggttatttttagaaagggagttgaatggagggaagtagggagtgtggagggtttgaggtttgtagataaggagaggtgtattttgggatttgggttttttgttgttataatataattgtgttattgttggtattgtttgatttaagtgttggtggtaagtggtgatgttggggttgggtttttagtaattgttgtgttttgggttaggttggttgttttagttattgggatttttttttggatgtttttagggtgataggtgttgtatttattgatgggatagttgtatatttttgaataggtagtggagtttgtttttggtaggtattttagttgtgttgatattaaggttgttatataatagttattagttttttttaagttttagaagtaggttttttttgttttagttatagtggttttagttgttgttatgagtttattttttatttttaagtgtatttttttttttttatttgggtttatgtttgttatatagagagaattatatagggggaattatggttttatatttttgaggggatagatattggttgtgagataggtattatgtagagttttttggtgattgtttgtaggagtgagattttttttggttttgtagttggttaggtgtgtgtgtgtgagggtttttagttgattattgggatgtattgttattttttggtttggtgggttttgggattttttggtttttgtaggaggttattttaggtttttggaggaggtgtttttagttggtggtgttttttgttttgggtttagaggtggatatggttggttgtgttttgttggttttttgtttgtgttgtagtgggttgggagtagttgtgtgatattagatttatagtgttaagatgtgaagtgtgaggaaattgttgtgtttgatttttttttttttaatttttggatttaggaatgtttttagtttttgtgttttatatgtttagttttggttttttttttggtttagaagtttttaaggattgaagggttttgtttagggttttgtatttttgtttgatttttatggtttagaaaagtagggggatatttgaaatgttattttgggataaatattaataaaaaagtaaatggatttgtgtaggggttagttattaattaattaggttgtaaggttatttagggtaaatatagtttaggttgggttgggtgagatttttttatggttgttttttgattgaatttttttttttttggtttaggttttttttaggttgttttggggtaaatattggatgggaagggggtgttgttaatttttttgtggggtttggaggtttttttgtttttaagttttgtagggtagggttggagtgtttaatatttatttttgtttgaattttgggtttgtgtgttgtttttttttgggtttgtggtgttgtgtttgttgttgggtgtgtgttgttgtttttttttgagttggtagtttttgttgtgtggttgaagttttttggaatttttaattggaaattaattttggttttgatagatgtttatgttagaggtgtgttatttatttatattttttgttttattttggaggagatgtggtgagaattttgttgt

SEQ ID NO: 147 - DNA, 2609 bp, Artificial Sequence
  chemically treated genomic DNA (Homo sapiens)
gtgatagggtttttgttgtgttttttttgggatgaggtggggggtgtgggtgggtggtgtgtttttgatgtgggtgtttattaagattaagattagtttttaattaaagattttagagggttttggttatatagtaggagttgttggtttggaaagagatagtgatatatatttaatagtaagtgtagtattgtggatttaggggaaggtggtgtgtaggtttgaggtttgggtgggggtgggtgttgggtattttgattttgttttgtgggatttggaggtgaggaaatttttaaattttgtgggggagttggtggtgttttttttttgtttggtgtttgttttagaatgatttaagaaggatttgagttaaggggggaggggtttggttggggggtggttatgagaaagttttgtttagtttaatttgggttgtgtttgttttgagtggttttgtggtttggttgattgataattggtttttgtataagtttatttgtttttttgttaatatttattttggggtgatattttaaatgtttttttgtttttttgggttatgggagttaggtaggagtgtggggttttaggtagagttttttaatttttgaagatttttgggttgggagagaagttaggattgggtgtgtgggatgtaggagttggaagtgtttttgggtttaagagttgggggagaaggagttaagtgtagtggtttttttgtgttttgtgttttggtgttgtgggtttggtgttgtgtagttgtttttagtttgttgtggtgtgaataaagggttagtagggtgtgattgattgtgtttgtttttgagtttggggtgaggggtgttgttagttgggagtgttttttttgaaggtttaggatggttttttatggagattaaggagttttagagtttgttaggttgaaaagtggtagtgtattttggtagttaattggggatttttatatatatatatttagttgattgtaaaattaaaaaaggttttgtttttgtggatagttattagaaggttttgtgtggtgtttgttttatggttggtgtttgtttttttgagggtgtaggattatagttttttttgtgtagttttttttgtgtaatgggtataaatttgggtgaggagagggaggtgtgtttggggataagaagtgggtttgtggtgatgattggaattgttatggttggggtaggggaaatttatttttggggtttaaggggggttgatggttattgtgtggtgattttggtgttagtgtagttaggatgtttgttagagatgaattttattatttgtttggaggtatgtggttattttgttaatgggtgtagtatttattgttttggaagtatttggagagggattttggtagttggggtgattagtttgatttagggtatagtggttgttagagatttagttttgatattgttgtttattattgatatttgggttggatagtgttaataatagtatggttgtgttgtagtagtagaggatttaaattttaggatgtgtttttttttatttgtaagttttgagttttttgtgttttttgtttttttttatttggttttttttttgggggtagttgggttgtgttgtggttgtggtgtgtgttttttgtgggttgttggggttgggtgatttgtgagtgtttgtggtttagtttgtggtagtgaagaaagggatgtttgttgtgtttttgtttttagaatgttgttgttttagtgaattttaaaataataattattttgataggaagaaagtgtgaaggaggaagagaaggatatttagagggtttgttggggtatttaataatgtttgggtgttatttaatttatgaaaataaaatttttattttttgaagtatattttagttttaatttttttaaaaaagatgtgtatttggattttgtatttgaagtatgtttttgttggtgtgtttttatttaagaaaagtggggttagtgtagagaaggtgattttggtggtttgaagttggaggttggagttgagggatataatatttggtggattggtggtttttttgttttgttgttttttttttttgtaaattgattggagttaggaggtagttttgaggttttgagttgagaagtttttgtttttttttgtgtggggtgggtgaaagggtttttggaggttgattggtttggagttttggtgtggagttaggattttggatagggttttattgttttgatgtttggttttatttttttttgttttggtaggtagatagaatgtttttgggaagttatagtaagaaaataaaaattaatagttaaagttttgaagttttttagggtgttaggtttagttgggaatatatattggtatattgaggtaattgaaaagattaaatttatttttgttgattgggtggttgatttttttgtttttttatgtggttttgtgtgagtatttgagtgtatgtgtatatttgtttataaaattggaatttgtgtttttgtgggtgtgataggggttggattattaagttaaaatgtttaatttagtttttttgatttgtgttggggaaaatttatagttatttttaatttatg

SEQ ID NO: 148 - DNA, 11667 bp, Artificial Sequence
  chemically treated genomic DNA (Homo sapiens)
tgggatttgtgggtgttaattaatgttatggtggtggagagtaaaggggatgaatatagtttggggttatttttggagttttttagtgtttgtttgtggttgtgtttggttggttgtggattttggtgggtgttgtaaagtggtgggattgttagtgtagagttttggttttttgttttgtttttgggtttgagtattggagtttttggtgtttgtggggagaagttttggattgagaaatatgggagggttttgttagtggttgtaggtgtggtagttattttggggatttagtgagaatggggttgtttggttttgtgtgaattttttatgtgggtgtagtttttgagttgttgagggaggtggtggtaatgttgtttagtgttagtagagggtagttttgaggttgtgagtttgaatggtgattttgttaaattgtgggtttttttttagtttttggattttgtggggtagaggtggttttggagtttagagattagtgattttagtttgtaggagtttggtgtagaggtttaagggtatttttgggatgtggttaagttatagtttttaggtagttttattttgtgatggtaagggtttagagggtggagggggattagatgttttaggaggggttagaaagttaatgtatatagggaatttgtttttaagtaatagattttaagtatgtggaaattttttaaatgatgttggtgagagttatgatagtttttgtatttttggtgagggaagttggaggttagtagtgggatggtttttgggtgtgtgggagatagagggattagtgatttttgttgggggtagagggattgtggattaaggatttagatatatttaattggggattttagttttgattgtggttatttaattggtgttgaatttgagtaatttattatattgttttagtttttgattaattatttttgtaaaatgggtattgtgggttttgagttttgtaagggtgttagggatttgagatagtaggaatttttttattgttttagtaattttgggtttttgggtttgtaggtgggttgaaaggatttttttattgtatgtttgtttggtgtggttgttttagagattgaggtttgttaggttttgtaatttagttgtgtgtggttagttatggttttggaattgttgggattgttttagtggtattttggttagtttttgattttttgttttgggtattagggttatttagttttagaagatagtgtttattagtataggaattgagattttatatttggtgtagtgggttttttaggaagtttggtgaagagttaaggtttgttggatttgaggttgtttggggtgttaaatagatttatttatgagtatatttggttaatatatttaagtttaatagtgggtgggatttttggttggttttgattttttttatagtgtgtgtaaatgggtatttattagattttttttgtttgtttttttatttgtaaattttgaaaggagagtattttttggggtgattttgaaaattatgttagaattgaaaaggtttgtgtaaatgtgaggtgtaatgatgatttattagaagtagttagttttgtatgtgtttgtaggatagatgttagaatgttttataaatgtgtgtatatatatattatgtatgtgtgaaggtgtatatttgtttttagatatttgataaatgtatatatgtatgtgtgtatttttggttgagagtaaaggggttaatatagggtttatataggatattattttgtagttttgtgtgtgtatagtatatatgtgagtatgattgtttgtgtttggagatattgtatggtattggaggagttgtttagttgttggtgttatttgggaagtagggttttgggtgttgttttggagtgtgggaaagtttggatttgggtttgttggttagtgttttggtgttgttgggtttttttattttttatttgttggttggtgagtggttttagttttaagatttttgattttgttggtgaggggagggagtgagaaggagtgtgttttgggtttaagaggttgtagggttttattttttaggtttgttgttttttttttatttttttaggttatatttttatttaaaataaagaagggtgtttgatttatttaggttagggaagttggtttttgggagttttttgtttttataagttatggtgaagggaggtgaagttagggtttgttatggtttgggagaaaatgtggttgtagggtttttttgggttgtagtgttggtttggggttttaagattgttaaggtgtgtgtgggaggtgtgtagtgtggttattgaagagttttttattattgtattggtaggttgttgggtttgttttttttttatgtttttaagggttttgagttgtgtagtatttgtattatttagaagtgtttgtggagaaaatgattttaggtgtaagtttaaggttgttgtttgtaaaggtaatgttgtggagattgggttttatagtgatttgggtttttaagttattgaaagttatagggtagggttataaatatttttttgttttttttgtagaattgtgtggttgataggagagtgttgtgtagaaaatttgaggttgggtgttggaggagtttttgtggtttggagaaggtatagaggtgtttttgagaggtgtagttggaataggtgatgtatgggtttggatttggttggttaattgagtttagtggttgtgaaaattagagttgttatagaggttgagtatgattttatttttggggattgggtttggtggggagttattgtttttaatgtttttagagattttaagtaggataatataatgttggtaggagtaaggtgtaaggaatttagtggtagaagttttttgggggggtggggaaaggtagatttgtgttttgtttgagtttgggggtggggatagtttttggttttgtagtttttgttttggggattagttgggtttatttaatttttttatatggggttgaaaggggttaatgggatggttttgttgttttttttttgggattttatagggttttgatttggtttttatttttgtatggttagtagttgtgggggttttaggaaggaggataaaggtttggtgttattgtgggtgggggtttggttttttggttttttgtttatatttatagtttttagtggttgttgggggaagatttttaaaaatatgtgttgaatttttttttttttttttttagaaataaataaataaaaaaggtaaaaggtgaatttttttttattttttgtttatagagattaaagttttttgggattttgttttttttttttttttgattgtttagaaatatttgtttttttttgtatatagaggaaaatgtggggaaaggttttttaaaatttggttttatattattattattattaaggataattgggtaggttgaggttttaatgtggatgatttgagttggttttgtgttggggttttgtagttattgttttgtgtgtttagtatttttgggggtgattagggtttttgtgtttttgtttgttgtttggtagttgagagtattttgtgtttagattggttgatttatttttttttgaattttgtttagagttggtaagggggatttagtttgtgttttaagatttgggtttgtagtgttgttaataggtttggggatatgaggtgttttaggttggggtttttttggttgttggttttttttgttttttatttgttggtggtgttttggttgtttgtaattgatttaatttgttttttgtgtttgttttttaggttttttgtttttttataaaggtttaggggagttttgtttataggttgattttgtaatttttggtttggtggttattttttgtttttttgaaaaagaaaaggaaaaaaaaaaaaaaaaagaaaaaattaattagttgagggaggtgtgtgaggattggaggtgttagttggatagtttatgagtaggtttttgggttggtgttgttttgtgggttagtatggttttttttagagaaaattttttaaatgtgtgaagattgttttgggggaagtgagagggaggttggaggagttttgggtggggttttagtgtttattagttgtgtttttagggtttgggtgtttgttgtaatggtaattgtgtgagttttatttttatggttaaggggttagggtagggtggatgtaattgtgtgtgtttggttttggaaggtgtttgtagggggtgtttgtggttagttgggttaggaagttaaattttagaaagttattattaaaggtttttttttttttttttttttttttttttttttttgtttttttttttttttttttttttttaataggggaagggaaaaaatattattgaatatttattataaattgggtatttaaaaattagaaaatttaattattttaataattttgatatatgtatgtatttttgttttatagaggagaatattgaaatttgaatgggtattttgtttaaggttatatagttgttaaagaggatattaggttttaatttagttttttttgattaaataggttaggtttttgttttatgttgtataggttatttttgtgaagtgataagattttagaatatgttttttatagtttagtattaagtttgtgtggtaaatagtttgtgtagtagtagtttttgtggtatagaaataaataaaaaaggtaaaaggtatagtttagattgtgtttttttttttttttgggaggtttttttttattatttttgggaggtttttttttattatgtagtttttttgagtattagtggtagttaggtttagttgttgttaagttttttttaaaaattttggaggttatttgttttatagatatttggaagatttttggttggttttttttttttttaggatttgagattttttaaatgtaatgtaattttgggtttttagatttaagatattttttttatgatagttgggagttttttttttagaaagtggaaagttgttaagattgtttggttttaagaatttttaatttttggttgttttgaaggtatggggtttttagttttattttttttttattttttttatgggttttatagtttattttaagaagtaggggttgttatatagtggtggtaggtttgatgggtagggttttagggttattattaggttagatttgtagaatggggatattgtagggatgttgagtttgattaagatgttttttggttttagatttttatttagaagttaggagtttggtttggtgattttgtttatgaagtttggtttagatttttataaagggaagagtttagttgagagtaaattattttgggttagatttagatttttggtttatattttgtttgtttggttgtatgaagtttgggtttggttttaatttttatttgttgttagggggttttttgtagttttatttttagttttggtttttaggaaattttggtaaaggttggatgtatttaattttggatgaaaggtttagggttttttgtttatttaagttttagatttggagtagtgaattatttattgatgtaagttggaaataggatgttaatattttttggagtagggtataggattatttttagaattttgtaggttttttttttatagttttttggtgtatgtattttaatggtgaagatttttttaggttttttttgagaataggatatttttttttgttttttttaaattaatttatttattttgattgggtaattttagtgaggtggaggtgattttaagaatttttgtgtaaatgtgaggagagggtttatattgttagtagtgtgtgagatgtttatatttattatatatataatttttatgtaagaatgatttattatttaggatatttagaaattggttgggtatttgtattaaattttatttatattgtatttatatattggttaatatatatatatatatttatatggtttagttatttaggttagattgtatatgttaaggtataattgttatataatttaaatatttttgtttttaggaattgtttaaattagtttttataatagaaatttaaaagtgtgaagagggagagaagagaaaggaaatgagagatgaagaaagtttgttattgaattaaatttttggttttggggaaaatgattaaatttaagagttttggagaaattttgagggttggagttagatagattttttttgtgggtatttatggggaagtggggtatgatttggttttttttttttattttttttaatttttgtgtagatttaggaaatttttattgattgttttattttgttttttttatttggtgaggttgttgttttttttttagttttgggtgttttttgttttttagtttttggggaggagataggttggttttttattgttggttttggttaatttttttgttttattggaggtgggttgttatttgtttattagggtttggttttggaagttttttttttttgttttttttgtttgagatggtagttgggggagtgttgatagttagttttagaatagggagtttttgtttgatgaagtaaaggttttgtttatattattttattttttagtaagttaggaatatatatttataaatgtatatattattaatgaggtatgaatgttatatatattgtggttttagtaagtattttttaagtgttagttatatgattattataatgttaaaaatatatgtttattttgtaggtgaatgatagatatatatattttttattttgttattaatatataattgatattgtatatatatatttgtagtagatatagattatataattatttgtttatgggttaaatttttatgttagataaagtataaatagatatgtatatagtaggttgttttttgttttgtaattttttttagttagatagtggagtagttgggtattaaaggtatttagatattaggtttgattagtttttagggttttttgttttagttgagtttttttttttattttgtttttgttggtttttggtaagttttagttttagttttgaggtgatgttttttgagaatttttgtggtttggttttttgttttgtagttttttgtaggatgtttgtggggggtggggggtattttgagtagaagttatttgggtttaattatatataataggatattattttgaggtttttattgtttgattattggagggttgaagtgagaggtttgtaggtttatttttgtggtgtaaaattgtttttggtttattagttggtttggatttgttgttatattgttggttaggttttgagatagatggggggggggtagtgagggttgggtgtggggtttagttttagttgagtagtagtttgtaagaattggtggatttattttattagaagttggaagttatttattttattagaagagtgaaagttgattattttttaatttgtttgggagaattagattgtaattaggttaaatgtttgtgtgtttgtgtggaagtatggattttaatttgttatttggggattttagtaaaggaagagagagaaagaaaaaagattaaatttttgtagttgtgaagtatgtttaatttttattgaaatttttaaattttttatttatattttaaggtaaatgaattttgattattaaaaataataaagtagttattttttatatttgtatagaggttagtagtttgtagtgtatttttataattagaattttatttattaatgtttggaataaatttttggttgttatagttgatttaaaattgaaaagtttgagaataataataaaaatatagttagtttatatatttagtataattgtgtatgaggtagaatataaatttgaataggtataaaaataaattaagttttatttatagttgtgttttgtgaatgaattatggtagaaaaagtttttttgttgatgttaaatagttgtaatgggttagtgatgatatagaaaataaataattttaggaaaataaagtagtagtgatagttataaatgtttgttattttggttgtttttaatttttgtttaatttattttgaaaaagataaaattttgttgaaaattttttttttttaattagttgttgaattaaggagtgatagaaataaagaagtttgtgttaaaagaaggaatataaaatttatttgggaattgataaggtaaaaaataaaaataaaataaaaaaatataataaaagtgttttagttttttttagaaaatttggttttttaaataataagttatagtataattaggtttatggtttttgggttgggttggttttgggttataagattgtttaggttggttgttgttgggttttatattttttttttttaaggtgggagaagtaggaggtttgaaaaataaaaagtagggaggatgagttgttttagtagtgtgggttaggtaggtagtgatttttttgtttttaggatttgtattgaaagatttggggatatttgtttttgatttttttttttagatagggagagggtgaaatttttttaattggtagatgaaattattttttattggatatatttttttaattttgaatatagttttttgaaggtttaataaaaattttaatgtaaattttttagaagagaagatgaggaatattaaagtttttgatttttatatttggatttagtaaattttaaggttataatatttttttggttgtttggtgaatttttttttttttttttttttttaaatatttttttaaaaagttttattgattttttaaataaaatattagttagttgttggggtttggaggtgtttgaagtgatgggattgatagtggaggaaatgtagtttttttttgtgtttgtttgtggtgtaaattgagtataggttgtggagttaggttgttttggtttttgttgggttttaatttttgttttgtttagtgggttttgtggtaagtggtttttgaatagttttaagagggtttgtggagtaaatatatgtattggtttgttttttttttgggtagtgtggttttgttattagttttgtttggtgtgtttagttatggattgtatggtagttgggtggggaatgtggagagtgagtgtattgatttgtgagagaaggttaagaggtttgtgttgttgatgtttggttgtatttttgttttgggttttttttgtggtgaatttgggtaggagatgttggggttttggaaagagatgagtttagtagaaagtgtgtagagaggtagttttaggttaggggagtgtaaggttatagaggttagggaggtgagtataggaggatataaattgaggggataaagaggagtgataggagtttaggaaagtgaaaaagtatagagggattttgggtgttggttttagaggtgggtttagagggtgtgaggttaggttggtggtggtgttgttggttgtgattggggttggtgttgtgtgtttttgtatttttgtatttgtttgtattggtatgtggtgggtttttagagattgaggtgtgaatgtagtgtgttggttttgttgttgtggttttagtaagagtaatgtattatggtgagtttgggttgttgggtataagtgaattgtaggtttggtgtattggtgggtgtgggtgttgggggtgtggtggtggttgggttggtagggttgagttggtttggtggtggtgtggtggttttgtggtgtggtggggtaggtggtggtgtggtggttgtgtgtagatggtgtgtgtgtggatgtgggtgggggtgtggtggaggtgggggtgtggttggtgggttttttaggttattgtatgagtttattatgttggggggtagtgttatgttttgtatgtgtgtgtatggtttgtatgaggtggttgggtttgttagttttttgattatagtggttgtgttagggttattggggtttgtggttgtagttgtagttgttgtagttgttgtggttgttgttatttggtaggaggtatagggtatgggtgagggaggttgtggtagtggttatgagttgttgaggaagttagattgtaggtatttggggggtgttaggtagttgtagttgttggttttggtgtttgttatgttgtatttgtttgtggtgtttttggttttgaagagttttttgttgggttggaagtgtgtgggtggtggttggaagggtttttttatgtggtggtggtgttggtagttgttttttttgaatatgtttttgtaggttgggtttagtgtttagtagttgtttttgtgtttgttgttgtttttgtgtggtattttgatgaagtatttgttgaggttgaggttgtggtggatgttattttgttagttttttttattttttttgtagaatgggaattttgtgatgatgtattggtagatgttggatagtgtgagttttttttttgtgtttttgtggattgttatggtgatgagtgttatgtatgagtatgggggtttttgtgttgggtttggtttttttggggttgttttgttgttatttttattgtttttgtttgggtttggtggtggtttttttggttttttgattgtgtgattggtttttggggttagtagggtttttgttgtgtttttgggtttggggtagttggttattatgataaagttggtgtgttgtggttgggttgtttttgttttttgttttaggtgttggtgtggtaaagagttggggtgtatgagtttgtttatggttaagttttaaatttttggagattgtggatgttgtttgtgtttgtttgttggaggtttgttgttgttttttttttttttttttttttttttagggagtggttggtgggagtggagtttagtttttggttatggggagtttgtttaatagagaggggttttggttttgttgtttttttttgtttaggttagtttttgttttggtgggtttttttttttgtgttttttttttttttttgttttttggttttttgaagtatgatttgtgtttttggtggagttgttttttggagtttttagtgtgttaggagttttgttttgttttgatttgtatgggttttattgagttttgtttgtgttaggtgtttttgtttttatagtggggtggttagttgtgtatgggtgagtttatttttaagttattttttgtaaatgttttgtatagtttggattggtttgtttttgtttagtgagttttaggggtttagttgatagttaggtttatgtgtttttgaaatttgttggtatttgttttgtgggttgggttgggagatgatgaggattttggtggggtttgtttgtatttggttaaagtttaggaagtttgggttttagtgaggaaaggtgttttaagtttttttgtggtttttaggtgaaagaaaatgatttttttgttttgttgtttgttgttgttttgaggttgaatttttagtttggggttggggaggggtgagatggtgagggggttggatggggtagggtggggagagttgttttgaggttttgggaaagttagtttagaaatgggtgtgattgtatgaagaagttttggtttggtttgttttttgtg

SEQ ID NO: 149 - DNA, 11667 bp, Artificial Sequence
  chemically treated genomic DNA (Homo sapiens)
tgtgagggataggttaggttgaggtttttttgtatagttatatttgtttttgggttgatttttttaaagttttagagtagttttttttattttattttgtttagtttttttgttgttttgtttttttttagttttgagttagaagtttagttttaagatggtagtaaatggtagagtaaaggagttgtttttttttatttgaaagttgtgaggaggtttggagtgtttttttttgttggggtttgagttttttgggttttggttgggtgtgggtagattttattggggtttttgttattttttagtttagtttgtagagtgagtattggtagattttaagggtgtgtgagtttggttgttggttgggtttttgaggtttgttgggtgggggtaggttggtttaggttgtgtggggtgtttataaaaagtgatttggagatgaatttgtttgtgtgtggttggttgttttgttataggggtgaaggtgtttgatgtaagtggaatttggtggagtttatatgaattagaatagagtgaggtttttggtgtattagggattttaggaggtagttttgttagagatgtgggttgtgttttgggaaattggggggtggggggaggggaagagtgtagaaaagaaaatttattaaggtggggattggtttgagtggggaggggtggtgaggttggagtttttttttgttgggtggattttttatggttagaggttgagttttatttttgttggttgttttttaggggaaggggaaggagaggggagagtagtgataggtttttagtaagtaagtgtgggtggtatttgtagtttttagaagtttgagatttggttgtaagtggatttgtgtgttttaattttttgttgtgttagtgtttggagtggagagtagaggtggtttggttgtggtgtgttggttttgttatgatggttagttattttgagtttgaggatgtggtgggggttttgttggttttagagattggttgtatagttaaggagttagaagggttgttgttgagtttaggtaagggtggtgggggtggtggtgggatagttttggagaagttggatttggtgtagaagtttttgtatttgtatgtggtgtttattgttatggtgatttgtgagagtgtggagaagaggtttatgttgtttggtatttattagtatattattgtgaagtttttgttttatgagaagaataagaagggttggtaaaatagtatttgttataattttagttttaatgagtgttttattaaggtgttgtgtgagggtggtggtgagtgtaagggtaattattggatgttggatttggtttgtgaagatatgtttgagaagggtaattattggtgttgttgttgtatgaagaggtttttttggttgttgtttgtgtatttttagtttggtaaggggttttttggggttggaggtgttgtaggtgggtgtggtgtggtgggtgttggggttgatggttatggttatttggtgttttttaagtatttgtagtttggtttttttaataatttgtggttgttattgtagttttttttatttatgttttatgttttttgttagatggtggtagttgtagtggttgtagtagttgtggttgtagttgtgggttttggtagttttggtgtggttgttgtggttaaggggttggtgggtttggttgttttgtatgggttgtatatatgtgtgtagagtatggtgttgttttttggtgtagtgaatttgtataatggtttgggaggtttgttggttgtatttttgtttttgttgtatttttatttgtatttgtatgtatattatttgtatgtggttgttgtattgttgtttgttttattgtattatggggttgttgtgttgttgttgggttagtttagttttgttagtttagttattgttgtgtttttggtgtttgtgtttattagtgtgttgggtttgtagtttgtttgtgtttggtagtttgagtttgttatgatgtattgtttttattgggattatgatagtaagattggtgtgttgtatttgtgttttgatttttgagagtttattgtatgttggtgtagatggatgtgaggatgtagggatgtgtgatgttggttttggttgtagttgatgatgttgttgttagtttgattttatattttttgggtttgtttttggagttagtgtttagggtttttttgtgtttttttgtttttttaagtttttgttgtttttttttgtttttttagtttatgtttttttgtgtttatttttttgatttttgtgattttgtatttttttggtttgaagttgtttttttgtgtgttttttattgggtttgtttttttttggagttttagtgttttttgtttaaatttattgtggaaagggtttggggtggaggtgtgattgggtgttggtagtgtagattttttggtttttttttataggttggtgtgtttgttttttgtgttttttgtttgattgttgtgtagtttatggttagatgtgttggataggattgatggtgggattgtgttgtttgagaaagggatggattaatatgtgtgtttgttttgtgaatttttttgaagttgtttagaagttgtttgttgtggggtttattaggtggggtgggggttgggatttagtgggagttggggtagtttggttttatggtttgtatttggtttatattgtgggtgggtgtggagggaggttgtgttttttttgttattagttttgttgttttgggtatttttgggttttggtggttggttaatgttttgtttgaaagattggtggaattttttaagagagtatttaaaaaaaaaaaaaggaaaaaaaatttattgggtaattggggaagtattgtggttttggagtttgttaaatttaaatatgaaaattaaaagttttagtattttttatttttttttttggaagatttgtgttagagtttttgttgggtttttaaaaagttgtgtttagagttaggagaatatatttaataaaagatggttttgtttattaattggggaagttttattttttttttatttgaagaaaaaaattaaaaataaatgtttttggattttttgatgtaagttttggaggtagggagattattgtttgtttggtttatgttgttgggatggtttgttttttttgttttttgttttttaaattttttgttttttttattttgggaaggagaaatgtgaaatttggtagtggttgatttaggtggttttgtggtttggagttggtttggtttgaaaattatagatttggttgtattgtagtttgttgtttgggggattaaattttttagagagaattagagtatttttgttgtgtttttttgttttgtttttgttttttgttttgttgatttttgaataaattttgtgtttttttttttaatatggatttttttatttttgttgttttttagtttagtagttagttaaaagaggaagatttttagtaaaattttattttttttagaatgagttaaataaagattgagagtaattggggtggtaggtgtttgtggttgttgttgttgttttgtttttttgggattgtttgttttttgtgttattattggtttgttgtggttgtttaatgttagtagaaagattttttttgttgtggtttgtttataaggtgtgattgtaggtaggatttggtttatttttgtatttatttaagtttgtattttattttatatatagttgtattaggtgtatgggttggttgtgtttttattattgtttttaaattttttgattttgagttaattataatagttaagagtttgttttaaatattaatagataaaattttggttgtggaaatgtgttgtaaattgttaatttttgtataaatgtgagaagtgattgttttattatttttaatagttagaatttatttattttgagatatgggtaggagatttggaggttttagtaaggattgaatatattttgtggttgtagaaatttagttttttttttttttttttttttttttattgagatttttaaataatgaattaagatttatgtttttgtgtaggtatataggtgtttgatttggttgtagtttggtttttttaggtggattagggggtggttggtttttatttttttgatgggatagatgatttttgatttttgataggatagatttgttggtttttgtgggttgttgtttagttgagattagattttgtatttagtttttattgttttttttttgtttattttggggtttggttagtaatgtggtggtaggtttaggttggttggtgggttaggagtggttttgtgttatgggaatgagtttgtaggttttttattttagttttttagtggttaggtggtaggaattttagggtggtattttgttatgtatagttgggtttaagtggtttttgtttagaatgttttttgttttttataggtattttgtgagaggttataaggtaggagattaagttatggggatttttagggggtattattttaagattgggattggagtttattaggaattggtaggagtaggatggagagggaggtttagttggagtaggaagttttagaggttggttaggtttggtgtttgggtgtttttggtgtttggttgttttattatttggttaaggggagttgtagaatagaaagtagtttgttgtgtgtatgtttgtttgtgttttgtttagtgtgaaaatttagtttatgggtaagtaattgtgtagtttgtatttgttgtaaatgtgtgtgtatagtgttagttgtgtattggtgatagggtgggaggtgtgtgtgtttgttatttgtttgtagagtgggtatatatttttggtattgtaataattatatggttaatatttaggaagtgtttattgggattatagtgtgtgtggtatttatattttattggtgatgtgtgtatttgtgggtgtgtatttttggtttgttgaaaaataaagtaatatggatagagtttttgttttattaggtagaggttttttgttttgaagttggttgttagtatttttttaattgttgttttaagtagagaaagtaagggagggaagtttttaggattaagttttggtgggtaggtagtagtttatttttagtgagatggagaagttggttggggttagtaatgaaggattagtttgttttttttttgagaattgaaaggtaaaaggtatttaaggttgggaagagagtagtagttttattaagtaaggaagataaaatgaagtaattagtgagggttttttgggtttatatagggattgaaggaggtgagagaagggagttaaattatattttatttttttatggatgtttataggaaaaatttgtttaattttagtttttgggatttttttaaagtttttaagtttggttattttttttagggttgaaagtttagtttaatggtaggttttttttattttttatttttttttttttttttttttttttgtatttttgagtttttattatagaagttgatttaagtaatttttgagggtaaaagtatttgagttatatagtaattatgttttagtatatatagtttggtttagatggttgggttatgtgagtgtgtgtatatatattggttagtgtgtaaatataatgtaaatagagtttaatataaatatttagttaatttttgaatgttttgggtaatgagttgtttttgtatgaagattatgtgtgtggtgggtgtaaatattttatatattgttgatagtatgagttttttttttatatttatatagaaatttttagagttatttttattttattaaaattgtttagttagagtaagtgggttggtttggagaaagtagggggaggtgttttgtttttaagagggatttggagaaatttttgttattgaagtatatgtattaagggattgtgggaaagggatttatggagttttggagatggttttgtattttattttagagggtattgatgttttgtttttagtttgtattagtaaatagtttattgttttagatttgaggtttagatgagtaagaggttttggattttttatttgaggttaggtgtatttagtttttgttagggttttttggaagttaaggttggagatggggttgtaaggagttttttggtggtgggtggaaattggggttagatttaggttttatgtagttagataagtagaatatgggttaggaatttgagtttggtttaagatagtttgtttttaattgagtttttttttttatgaaggtttgggttaggttttatggataggattattggattagatttttggtttttgggtgggggtttaaggttaggaaatattttgattaggtttagtatttttgtagtgtttttattttgtagatttaatttggtggtgattttggggttttgtttgttaggtttattattattgtgtggtagtttttattttttggagtagattgtgggatttatagaaaagatggggaaaggatgggattaagagttttatgtttttgggataattaggaattaaggatttttaaaattgagtagttttagtaattttttattttttggagagaggatttttagttgttataaaaagagtgttttgggtttaggaatttaaaattatattatatttgaggaattttaggttttaagaagagaagagattaattagaggttttttaggtatttgtgaggtaaatggtttttgaaatttttaaaggagatttgatagtagttgagtttagttgttattgatgtttaagggagttgtgtagtaagggagagttttttaggagtagtaagggagagttttttaggagaagaaggaagtatagtttgagttgtgttttttgttttttttgtttgtttttgtattatagaaattgttgttgtataggttgtttgttgtataggtttggtgttgagttgtgaaaagtatgttttgggattttgttattttgtggaggtggtttgtgtagtatgaggtaaagatttggtttgtttagttaggaagaattgggttggagtttggtgttttttttaatagttatgtaattttgggtaaaatatttatttaaattttagtgtttttttttataaaatagaaatatgtgtgtgtattagaattattaaaataattaaattttttaatttttaagtgtttagtttatagtagatgtttaataatgttttttttttttttttattaaaaaaaaaaaaggaaggaaggaagtaaaaaaggaaagaagaaaggaagggggaaaaaaaatttttagtaataattttttaggatttgattttttaatttagttggttataggtattttttgtgagtattttttggggttaggtgtatgtgattgtatttattttgttttagttttttggttgtgggagtgaggtttatgtggttgttgttgtagtgaatatttaagttttgaaggtatagttggtgggtgttgagattttgtttggggtttttttaattttttttttgttttttttaaagtggtttttatatgtttaggaggttttttttgagaaaggttgtgttgatttgtgaagtggtattgatttagggatttatttataggttgtttggttggtgtttttagtttttatgtgttttttttgattggttgatttttttttttttttttttttttttttttttttttttagaaaagtagaaggtagttattgggttagaggttgtagggttagtttgtgggtgaggtttttttaggtttttgtggagaaatgggaaatttgaggggtaaatgtaggaagtgggttgggttaattgtgggtgattgaggtgttgttagtgggtggggagtgagaggggttagtagttgggaagattttggtttggagtgttttgtgtttttgggtttgttggtggtgttgtaagtttaggttttggggtgtgagttaagttttttttgttagttttaaataaaatttgggggagaatgagttggttagtttgggtatagggtgtttttgattgttgggtggtgggtggaagtgtaggggttttgattgtttttagaggtgttgagtgtatagggtagtggttgtagagttttggtgtgaggttaatttggattatttatgttgggattttagtttgtttggttgtttttagtaataataatagtatgaaattgagttttaaaaaatttttttttgtatttttttttatgtataagggagaataagtatttttaggtagttaaagaaaaaaaaagggtaggattttaggaaattttaatttttatggatgaggagtgaaggggaatttgttttttgttttttttgtttgtttgtttttagaagagaaaaaaaggaaatttgatatatatttttaaaaatttttttttaataattgttaaaggttgtgagtgtgagtagagagttaggaaattgagtttttgtttgtggtgatattgggtttttgtttttttttttgaagtttttgtgattgttgattgtgtagagataaaggttgggttagggttttgtggaattttgagggaggggtggtggggttgttttattggttttttttaattttatgtaggggggttaggtgggtttagttgatttttggaataggggttataaggttaggggttgtttttatttttaggtttagatgaggtatggatttgtttttttttatttttttgaaaggtttttgttgttaaattttttgtattttgtttttattagtattatattgttttatttaaagtttttggaggtgttagggatagtggttttttattggatttgatttttagaaatggaattgtgtttaatttttgtggtgattttggtttttgtgattgttgggtttggttggttggttagatttgaatttgtgtattgtttgttttagttgtgttttttaggggtgtttttgtgttttttttgggttgtggagatttttttagtgtttggttttgaattttttgtgtaatgtttttttgttagttgtatggttttgtagagaaggtgggagagtgtttgtgattttgttttgtagtttttggtgatttaaaaatttaggttgttgtggaatttagtttttatggtattgtttttgtaggtagtagttttgggtttatatttgaggttgttttttttatagatatttttgggtgatgtgagtgttgtgtagtttagaatttttggaagtatgagaggaggatgagtttggtggtttgttggtgtggtgatggagggttttttggtagttatattgtgtgttttttatatatattttaatagttttggggttttgggttagtgttgtagtttaaagagattttgtagttgtatttttttttaggttgtggtaaattttggttttgtttttttttattatggtttgtgagggtaggaggtttttgggggttgatttttttgatttgaatgagttaggtatttttttttattttaagtgggggtgtgatttgaggagataaaggaaggatgatagatttggggagtggggttttgtagttttttgggtttggagtgtatttttttttgttttttttttttattggtaggattgggggttttgaaattggagttgtttattggttggtggatgagagataaaggagtttggtggtgttgaagtgttgattagtagatttggatttggatttttttgtgttttagagtagtatttgaaattttattttttaggtggtattgatggttgagtagtttttttggtgttatatggtgtttttaggtatagatagttgtgtttgtgtgtgtattgtgtatgtataagattgtaggatgatgttttgtatgagttttgtattagtttttttgtttttagttagaggtatatgtatatgtgtgtgtatttgttaagtgtttagggataggtgtgtatttttatatatatgtgatgtgtatgtgtatatatttgtagaatgttttagtatttattttataggtatgtatagggttggttgtttttaataagttattattatattttgtatttatataggtttttttagttttggtatgatttttagaattattttgggaaatattttttttttaaagtttatagatgaggaaataagtaaaaagaatttaatgggtatttgtttgtatatattgtgagagagattgaggttagttaaagattttgtttattgttgaatttgggtgtgttggttgaatgtgtttatagatgggtttgtttagtgttttaggtgattttaggtttggtgggttttggttttttgttaggttttttgggagatttattgtgttgggtgtggggttttaatttttgtgttgataagtattattttttggagttgggtgattttagtgtttagggtgggaagttgggagttggttggagtgttgttgaggtgattttggtggttttaaggttatggttgattatgtgtaattgggttgtaaagtttggtgggttttggtttttaaagtagttatgttaggtaaatgtgtgatgaaaggatttttttagtttatttataaatttaggaatttagggttgttggagtagtgaggaaatttttgttgttttgaatttttagtgtttttatgagatttggagtttataatgtttattttatagaagtgattagttggaggttagagtggtatagtgagttgtttaagtttaatgttagttgagtggttatagttgggattggaatttttaattaagtgtgtttggatttttggtttatagtttttttgtttttagtaaggattgttggtttttttgttttttgtgtgtttaggagttattttgttattagtttttgattttttttgttaagaatgtgaaaattattatagtttttattagtattatttaaaaggtttttatatgtttggaatttgttgtttgaaaataaattttttgtgtgtgttggttttttaattttttttaaggtatttggtttttttttattttttaagtttttgttgttgtagagtgaggttgtttaagggttgtagtttgattatattttgggggtgtttttgggtttttgtgttgggtttttgtagattgaggttgttggtttttgggttttaaggttgtttttattttgtagaatttgggagttggaagggagtttgtggtttggtgaggttgttgtttgggtttatggttttgaggttgttttttgttggtattgggtgatattattattgttttttttggtggtttaggagttgtatttatgtgaggggtttgtgtagagttaggtgattttatttttattgggtttttagagtggttgttgtatttgtagttattgatgagatttttttgtattttttaatttgagatttttttttgtagatattagaggttttggtgtttggatttagggataaggtagagagttggagttttgtgttggtaattttgttgttttgtggtgtttgttgggatttgtggttaattaggtatggttataggtggatgttgggggattttggggatggttttaggttgtgtttgttttttttattttttgttattatagtattgattggtgtttatgggttttg

SEQ ID NO: 150 - DNA, 1394 bp, Artificial Sequence
  chemically treated genomic DNA (Homo sapiens)
tggaattttggtttgaagttgagataggagattggatgtgaggtttttttagagttggttttttttaaataatttttaaaatttttagattttaggggtatgttgaaattttttaaagtagtttaaagaatataatgagagttttaatattttaggtggtggtgtgttggttttttggagtggggtgggatgtggttgtgtggatttatgtgtataattgtgtgggatggggttatgtggatttatgtgtataattgtgggattttagtgttagtgggattttagtgttagtgggattttagtgttagtgggattttagtgttagtgggattttagtgttagtgggattttagtgttagtgggattttagtgttagtgggtttgtggtttagtggagtgagtggagtgttggtgatttgagtggagattgtgttttggatgttttagtttagatgttaagttatagtttgtgtagtagtagtaaaggggaaggggtaggagttgggtatagttggatttggaggttgtgatttaggggaaagtgtgggtggttgatttagggtagttgtggtggtgaggtaggtgggttttttgttttttggagttgtttttttttatatttgtttttggtgtttttagtagtttttattttggttttttgtggttattgtgggatttggtgttgttgttagtttagtggggagtgaattagtgtttttttttgtttttggtttttttgatggtatgaggaatttttgttttgttttatagatttttggtttttgttgagtgtggtattggagtttgttttgttagggttttggaattagagaaagttgttttttggttatttgaagtgttggatttttatagtgttttttagtttgggtgggagtggtggttgtgttgttgaaggttggggtttttggtgtgaaagggaggtagttgtagttttagttttattttagaagtggtttttgtattgttgtggtgggtgtttttgggttttgattttgttagtgttgtggggtagaggtatttggagtttgtagggtttagatttgggttggaaaagttttgttgattgtaggtaagtgtttgggaggggtggttaggtgaagttttggtgttttattatatatttttgggttttatgttagttgtatttgtggtattgggtaggaaatggtagggttgaggttgattttaggagtataagggagttttttattttttgtttatatttgttatttttagttttgtaatttattttagatatatagaaagtaagtaggattggtggggagatggagtttaataggaatattttttagtagtgagtaggggttgtatgggatgtgggaggagtttagaggaggtgtggagagtgtttg

SEQ ID NO: 151 - DNA, 1394 bp, Artificial Sequence
  chemically treated genomic DNA (Homo sapiens)
tgggtattttttgtgttttttttgagttttttttgtgttttatatagtttttgtttattgttggaaaatatttttgttaagttttgtttttttattagttttgtttgttttttgtgtgtttgggataggttgtaaaattggaggtgataaatgtgggtaggaaatggagggtttttttatatttttagggttggttttagttttgttattttttgtttaatattgtggatgtaattggtatgggatttggaagtgtgtggtaaagtgttggggttttgtttggttgttttttttggatgtttgtttgtagttagtgaagtttttttaatttaggtttgggttttgtgagttttaggtgtttttgttttgtggtgttggtgaagttgaagtttgagaatgtttattgtagtgatgtgaaggttgtttttggggtggggttgaggttgtagttgttttttttttgtattaaggattttaatttttagtgatgtagttgttgtttttgtttaggttgggaggtattgtagggatttgatgttttaggtggttaaagagtgattttttttgattttagggttttggtggggtaggttttagtattgtatttggtggaggttgaaggtttgtggggtaggataggagttttttgtgttgttggaagggttgaggatgaaggagggtgttaatttattttttattgggttggtggtaatgttgaattttgtagtgattgtggagggttaaggtgaaaattgttgggggtgttgagggtaggtgtggggaggggtggttttagggagtaaggagtttatttgttttgttgttgtagttgttttgggttgattgtttatgtttttttttgggttatgatttttggatttaattgtgtttggtttttgtttttttttttttgttgttgttgtgtgggttgtaatttgatgtttaggttggggtgtttagggtgtagtttttgtttaggttgttagtgttttatttgttttattgggttatagatttgttggtgttggggttttgttggtgttggggttttgttggtgttggggttttgttggtgttggggttttgttggtgttggggttttgttggtgttggggttttgttggtgttggggttttgtggttgtgtatgtgagtttgtgtggttttgttttgtgtggttgtgtatgtgagtttgtgtggttgtgttttgttttgttttagggagttagtgtgttgttatttgggatgttaggatttttgttgtgttttttggattgttttgggggattttggtgtatttttaggatttaggagttttggaagttgtttgagagaaattagttttgggagggttttgtatttagttttttgttttggttttggattggggttttg

SEQ ID NO: 152 - DNA, 6357 bp, Artificial Sequence
  chemically treated genomic DNA (Homo sapiens)
gtgtggagattgggaaggtgataaggtgaaggtaattgaaggaagagttgagggggatatggggaaggattttgttttattttttttaagttgaattattgttttttgaaggttggtttttggagaaattaaagggtttttgtgtgatatagttatgttatatataaatagaattttgaagtttattaatttttgaggttaagtaagagggaatgtaggggttaaggtagaagagaaattaaaattttagagtgttgagtaaagatgttaattagagaaagagaaatttatttgtgatgttaattaataagtggttaattaaaatggtattttgagtgttaattaattgttttattaagttatagttattattggaataaattgaaatttttttgttttgttttttgtttttggtgtaggtggggttgtgtttttagatattgtgagaggttttggggtgtggaggttgggggtagttttggttagtttttttagttttttttaggtttatagaatatgttattggataagtgtttaagtagtgatttttggtttagatatattgtttggggagtaagtagttgtgttgaagaataatttatttagtagtagttaatattgatgtttttttttagaaagagtttttgtaaagtggggggatgtgatttgtgggtttttagtaggggtaggaggtagtttagtttgagagggggtgttttagggtttggattttgtatttttattttttggaatatatttaatgttttattttgaaaattttgtttaggttttggttttggtgttgtttagtaattaggaaagagttggatttgtttttaggtagtaagaataggattgttagttttttgtggttttgttttttgaggttttatgagaaggggatgggggtgtaagaagggaagagtgaggtggtgtgttgggtgttggggatgaggatgtatgttagttaagatgtgttttttatttagtttatgtgtgtttttttatttttttggttttttaaaattggtaagagaattaagattttgaatttttattttgaggagttttttgtattttttaattgttaaatttttgttttttattaaatttttgggggagaaatatttggtaataagaagggattgtgaatttaaatgttaattgagtgggttttttttttgtagttttatttgtttggtagtttttgttgaaattaaatatatttggagtgtttagtgtaatatttttggggtgttgagtagaagtgtagtaaagagagattttagtggatttttgtttggtttgttttttattgatttttatagaaaaaaagagaatgttattggaagaagtttttttgtgtggtgggtgatgtgtgggtgggggatttgtggtatggtttatggtgttgtttttgtgtttgtgatgatatatgtatgttttgagttgtgggtttgtttttttggaggtgtgtttgattgtatttgttggtgggtttgagtgtgtttggggtgttttaggagaattgagagaatggtttttatgtgtaaagttttaaagtattaatatttttattatattattattatttaatataataatatttgtttggttagtggtattaattaggttatattaaaattgtagtgtgtttttaatggtgtgtaatgtgtttatatttatatttttttttttgaggatgggtggttgtaggttggtaggggaggagagataggtaagtggtgggttggattagggtgtgatgttttttattatgtatataaatatatatagtttattggatgtttgttgggtgggagttgtaatttttgtgtggttgatggggttttttgttgtgtatttggttttgtgttgagtattttgtagtttttttttgtgatatggtgttttgaatttggtggattgattttgtttttttttttttttttgtgtgtgtttgtgtttaattggttaggtttttaagatttgggagggttggtgtgaaagaattaaaatatttttaattggagtttttttgttgagaattggaggttttgttttttagtttggtgtttttaggattttttttttagagggaattttttttagaaattttagggtgggtttgtaaaagatgtttttgtagagtaggttttgttagggttttttttttgtttttggtgttagtggttggtttgggtgttttgtagattttggtgaggtagatgttaagtttggagagtgttttttttgtaggtgttgtggtgagattattttgaatatgtaatatatttgtaatgtgtgttgaggtgtgatgtgtgtgttgaaatagggggatgggggaatttgaagttggattgggaaggtgggggggaggtgtatagaatttataatgtattttgtaatttaataatttgaatatttatttattaaaagttgttgtgtgatatttatattgagttattagtttttgtttttaatttgggtgaaaatgattgtattgttgagttatggttgtagtgtatggggatgttgttgtttgtggttggatagagtttattagttataatgtggaaggtttttgtatttttttgggggtgggaggaaagtattgttagttttgtttgggggttgagggtaataagtattgagttttttgttttatgtagggttagttgtttagtttagtgaagtttttgtgatttggtgtgtgttttttgtttttttttttttattaaagaagtaaattttttatttattttttttaatttgattgtttagagttgttgttttttttttgttagattttttttttttgattagtttgagtatatgattagaattgtttagagagtaggaagtatattgattttagtttgttttgtttatagataggttttgataaggttgttagaatagttggagaggtttatataattatttaattattaaaattgttagttaggtgggatgtggatttgtgttttgggttgtgttaggtattttagtattgggttgtgtgtgtgattgattggtgttgatagtattgtaaaataattatggtgaattttttgatgtgtgattttattttaagtttatgttttagagaggtaattggagaatgagaagggttagtgttattttggattatttggaatttgtgagaaagggtaaaatgggggaaggagttttgaggaaaatgggagagatgggggtgtagagagagagggaagaagaaagtgagttatggattgttggagggattgtaagtaatttgttaaattgtgtaagtgattttttttagagttagtatatggtagattgattttgtttaatgttggttttagttatatttaaaatgatttagtggttattattgtgattggtttaggaattgataggtagttttaggtgtaaggagtatagattttgtttattggagatgtgtttgtaattgttgttaaatatagttaagtaaatattattagtgaagagttttgttaagagaaatgttaatttaataaatatgttttttttttttgttttttgtatggttgtttgtgttttttttagaggtttttttttttgtttttttgttgtttgggttagatgttttaggtatggtgttgatttttgttattttggagttttgagttgagttttgggtagaagatgataggttagttgtggggtaaggaggttgtggaaatgtggaatggttttggggagatggaagtgtttaatgagatttattttgtagtttgggtttagtttattttttttggagattgttgtggtttttgaatttgggtttaggtttttatgttttggtggttagaggatgttgtggggattattggggagttgtttttagttagttttttgttttatgttggaggttttggtgtggttttttttttgaattagattggtgattttgggttaggttttaaggattgttttggtttttttggttttgtggggagaatttgaggaattgagtttaagatagttgatttaggttgtttttatttagattttgtgtttttgatttgttggagtgaatttgatattgttaggtttttttttatggtatggagtgaatgaagagggttatagatttttttatttagtatagttttttggtaggttttggaaatttatagggagtagaagtatagtattttttgaattgttttttttttttgggtttgtggttatttgaaggtagagttttgtgtttttaagatagtaggtttttggttaagtttggagtttggggttttaatatatttatatagggttggtattattgtttttttggattaaaggtaggtttttatattttttttaaaggaatagaaggaaggaaaaggaaattaatatgggttatgtttagatagtaggtttatggtaattttttatagttatagagttttaatttgagtatttttttagagaggaaaaatttaaaaaatttttaaaagggggaaagttgggtagattatagtatttattttttatgtttaggtagaaaaattaatttagagggagtaaaggggtaagaaatatgaagagattttttttgggagttgaggagtattttagtttataatttggttaaaggagaaagttattggtttttttttttgatagaggtgtgttatttatttttttagggaatatgatggtttataaatgaagaggttagtttttttgtagtttttttttatagagtgtaaaatatatattgtttttattagtgtttgggatgtaaagaattttgtttatttaaaagagatattgtatttttaaagttaaatagtattaatgtatgtggtgaattaagtaggtaaataatttatatatggttgttgtatttgaaggaattatttatttttatgtatagtaaattgaagaaataatggtattaatgagttttgtaaaatgtaattgtgaataatgaaagataatattgtattttgtaatagaaagaataaaggtgaaataattagttagtaaagaggaaaagaaagtgagtaatgattaaatgattaaaagttggtagagtgaatttaatgttattgttagatgtagttatttatttataagtgaaagttaggttttaagtatagtgtaattatagttggggttgttagtttgatattaatgtagttagtagaaattttttaattggttttagaggagaaagtgaattagaaaatatattaatattttaaaaaagtatattttgtttaatttttttatttttgaataatatttgaagattaaaatgttttaggtataagaatttaaatgagtaattttgtttttgaaggaaatggttaatgagatagaaaatagattaaagggaaattattagtggatgagagatattgataggtttgttttgttgattggttggtttgttatttgtagtttgtgttttttagttttatgttatgagttaagttgataatatgaaaagatttataaatgtgtagttagaagttatagtttattatttggaaatttaaatgtaaggggagggggtggtagagaaggtattggtgaggttgggagggagaggtgtgtattgagggaggaggaggaggaggaaggggaggagggaaaggaggaggaggaggagaaaagaagtttttattttttggtataaaattggttatattagagaataataataagttattatttgttataaatgtgttatggattgttaaaaaatgtagttttgaattgataatattgtttgaattgaagatagtaataaaatgtttaaagttgtggatgtaattttatatgtgtttgggttgatgtgatatgattgtattagggaaataaagttaagtgtagttaggatttgttagtatagtggtttttgatggaatagttgaggtatatattgtttgtggtatggattttggggttgaatgtttatgattaagatttttgtttttttgaaatgaaatagaaataggggagttgtaggaaaattgaattgtgtttagggttaggagtaagataggagtttttagtgaagatttgaatatttagaattggaatgggtaattagtagatagttaggaaaaaataaataaataaataaaaaagtttggatggatttttgtaaataattattaagaaaaataaaaatgaatttttttattagtttgttttggaggtagttagaaataaataattaaagtaagagaggatgaagatttaaataaaataattatgtgtattattaaaataattatatatgtttgtatagatatgtatatattaaggaatgtaatgggggttttttgtatagttttaggagatgtagga

SEQ ID NO: 153 - DNA, 6357 bp, Artificial Sequence
  chemically treated genomic DNA (Homo sapiens)
ttttgtattttttgggattgtgtgaggagtttttattatgttttttggtgtatatgtgtttgtataaatatatatgattattttaatgatgtatataattattttatttaaatttttatttttttttgttttggttgtttgtttttgattatttttaaggtaggttaataagaaggtttatttttattttttttaatgattgtttatagaggtttatttaggtttttttatttatttatttatttttttttggttatttgttaattatttgttttagttttgaatgtttagatttttgttgaaagtttttgttttgtttttgattttaagtgtgatttggtttttttgtagtttttttatttttattttattttaaaagggtaaaagttttggttgtgagtgtttggttttggagtttatgttatgggtgatgtgtgttttagttgttttattaaaagttattgtattaatagattttgattgtatttagttttgtttttttgatatggttatattatattaatttggatgtatgtgaaattatatttgtaattttaagtattttgttgttatttttagtttgaataatgttgttgatttgggattatattttttggtagtttatagtatatttatgatagataatagtttattattgttttttgatatggttgattttatgttaaagaatgagggttttttttttttttttttttttttttttttttttttttttttttttttttttttttttttgatgtatattttttttttttaattttgttgatgttttttttgttattttttttttttgtatttgaatttttagataataggttgtgatttttggttgtatgtttatgggtttttttatgttattaatttagtttatagtgtggaattaaagaatatagattgtaagtgataggttagttagttagtaaggtaagtttgttagtattttttatttattaatgatttttttttagtttattttttgttttattggttgttttttttaaaaataaaattgtttatttaaatttttatgtttggggtattttggtttttaaatattgtttgaaagtgaaaggattaggtaaaatatgtttttttaaaatgttaatatattttttggtttatttttttttttgaggttaattaggaaatttttgttggttgtattaatgttaaattgataattttagttataattatattgtgtttgaaatttaatttttatttgtgggtagatggttgtgtttggtagtgatattgaatttattttgttagtttttgattatttaattattgtttgttttttttttttttttgttagttgattattttatttttattttttttgttgtaaaatgtagtgttgttttttattatttatagttgtattttgtaaggtttattagtgttattgtttttttaatttgttgtgtatgagaatggatggtttttttaagtgtagtaattatatgtaagttgtttatttatttgatttgttatatatattggtattgtttgattttaaaaatgtagtattttttttaaatagatagggttttttatattttaaatattgatgaaggtggtgtgtgttttatattttgtagaaaaaagttgtaggagggttagtttttttatttgtgaattattatgttttttgggaagatagatgatatgtttttattaaaggaggaggttagtgatttttttttttgattaaattataaattagggtgttttttagtttttagaggggatttttttatattttttatttttttgttttttttgggttagtttttttgtttaggtatgaagaatgggtgttatgatttatttagtttttttttttttaaaagttttttgggttttttttttttgggaagatatttggattaggattttatggttgtgaagaattgttataggtttattatttgaatataatttgtgttggtttttttttttttttttttgtttttttaaaaaggatataggagtttgtttttagtttaaggaaatggtgatgttaattttgtgtaaatgtgttggggttttaggttttaaatttgattgaaaatttattgttttggaggtatagagttttgtttttaaatggttataggtttagggagagggagtggtttagaaaatattgtgtttttgttttttgtggatttttagggtttgttgagggattgtgttgggtaaggggatttatggttttttttatttattttatgttatgagagagaatttggtagtgttagatttattttagtgggttggggatgtagggtttgggtgaaaatagtttaggttggttattttggatttggttttttagattttttttgtaaagttggagaggttggggtggtttttggggtttggtttagagttgttagtttagtttgggaaagaagttgtgttaggatttttggtgtggggtagagagttgattgagggtagttttttagtggtttttgtaatgttttttggttgttgggatatgaagatttaggtttgggtttgagggttgtggtaatttttgaggaaggtgggttggatttgggttgtagggtgaattttattgggtgtttttgtttttttgaagttgttttgtgtttttgtggtttttttgttttatggttggtttgttattttttgtttgaggtttagtttggggttttaaggtggtgggagttagtattatgtttgggatgtttgatttaagtagtaaaggagtaggaaggagaatttttggaggaagtgtaggtagttatgtggagggtggggaggaaaagtatatttattggattggtattttttttaatagagttttttgttaatgatatttatttaattgtatttgatagtagttatgaatatatttttggtaaataggatttatattttttgtgtttaaaattgtttgttagtttttaagttaattgtagtaataattgttggattattttaaatgtggttaaaattgatgttggataaaattaatttgttatatgttggttttgaaggaaattatttgtatagtttgatgaattgtttgtagtttttttagtaatttataatttgttttttttttttttttttttttgtatttttattttttttgttttttttggagtttttttttttattttatttttttttgtagattttaggtaatttgaaatggtattgattttttttattttttgattatttttttgaagtatgaatttgggataaaattatatattagaaaatttgttgtaattattttgtggtgttattagtattgattaattatgtgtgtggtttagtgttggaatgtttagtgtagtttgggatgtggatttgtgttttgtttgattgatagttttggtaattaagtgattgtatagatttttttggttgttttaataattttgttagggtttgtttgtggatagaataagttgaaattaatgtgttttttgttttttgagtagttttgattgtgtatttagattgattggggaggaggaatttgataaaaggaaaatagtagttttaaatgattggattagggggagtaggtagaaagtttatttttttgatggggagggaagagtgagagatatgtattagattataagagttttgttgagttgggtagttggttttgtgtggagtgagaggtttggtgtttgttatttttggtttttaggtaggattggtagtattttttttttgtttttaagggggtgtagaggttttttgtgttgtagttgatgggttttgtttggttgtggatagtagtgtttttatatgttgtagttataatttggtagtataattgtttttgtttggattagaggtagagattggtggtttagtgtaaatgttatgtagtagtttttaataaatgaatgtttagattgttagattgtgaagtatattgtgagttttgtgtgttttttttttgtttttttaatttggttttgaatttttttatttttttattttagtatatatattatattttggtgtatgttataaatatgttatatatttagagtgattttgttatggtgtttgtgggaggggtattttttgagtttaatatttattttgttgaggtttgtggggtgtttgggttgattgttggtattaggaataggaaaaagattttgatgggatttgttttgtggaagtgttttttataagtttattttggaatttttgaaagaaattttttttgggaagagggttttgaaagtgttgaattaggaggtgggatttttagtttttggtggaggggttttagttaagagtattttaatttttttatattagtttttttaaattttaaaaatttaattaattgaatgtaaatatatataaaagggggaagggaagtaaaattaatttgttgagtttaaagtgttgtgttgtgggaggaggttgtagggtgtttggtgtagggttgagtgtgtagtggagggttttattgattgtgtggagattgtggtttttatttggtagatatttagtgggttgtgtatgtttgtgtgtgtggtggggggtgttatgttttaatttagtttgttgtttgtttgtttttttttttttattagtttgtagttgtttatttttagagagaaaaatgtgagtgtgagtatattatgtattattagggatatattatggttttaatgtggtttaattagtgttgttaattgaataaatattattatattgaataatgataatatgatgaaaatattaatgttttggaattttgtatgtgggagttgtttttttagtttttttgggatattttaagtatgtttagatttattagtagatgtggttgggtgtatttttaggaaggtgagtttatagtttaagatatatgtgtgttattgtaggtatagaaataatattgtgggttatgttataagttttttatttatatattgtttattatgtaaaagagttttttttaatggtattttttttttttttgtaagagttggtaaaaagtaaattagataggagtttgttagggtttttttttattgtgtttttatttggtattttaagaatgttgtattgggtgttttgagtgtgtttggttttaatagaggttgttaggtaggtggagttgtggaaaaaggatttatttaattagtatttaaatttatagtttttttttattgttaaatgttttttttttgggaatttggtgaaaagtaggaatttaataattaggaaatgtggaaggttttttaaaatagggatttgaaattttaatttttttattgattttggagggttaggggggtggggaagtgtgtgtgggttgggtgggaggtatgttttggttggtgtgtgtttttgtttttgatgtttagtatattattttatttttttttttttgtatttttattttttttttatggagttttgggagatagagttataggaggttggtagttttgtttttgttgtttgaaggtaggtttagtttttttttggttgttgagtggtattagggttagggtttaagtagggtttttagaatgaggtgttgggtgtgttttaggaaatagggatgtaggatttaggttttagagtgtttttttttgggttgaattgttttttatttttgttgggggtttataggttatatttttttgttttgtgggagttttttttaggaggaaatgttggtgttaattgttgttgaatgagttgttttttgatgtaattatttattttttgggtggtgtgtttggattagaagttgttgtttaggtatttgtttagtggtgtattttgtagatttgggagagattgagaaagttgattgaggttgtttttaatttttgtgttttaaggttttttatggtatttgggaatgtggttttgtttgtattaaaggtagaaaatggggtggggaggttttaatttgttttagtgatggttgtaatttaataaggtgattgattagtatttaaagtgttgttttaattagttgtttgttaattaatattgtaaatgaatttttttttttttgattggtatttttgtttagtgttttgaggttttggttttttttttgttttggtttttatatttttttttatttagttttaggagttgataggttttagagttttgtttatgtatgatatggttgtgttatataggggttttttaatttttttaggagttggtttttaaaggataatggtttaatttaggaggggtgaaataaaatttttttttatgttttttttggttttttttttaattgtttttattttgttatttttttaatttttatat

SEQ ID NO: 154 - DNA, 167 bp, Artificial Sequence
  ONECUT 1 MSP-Amplicon
gttttgaaatttattagaataacgacgttttaaaaataaaggcgtagtaagtattttttttttcgttgtcgcgggttgaattacggacgttcgcgggtcgtttagtttcgacggttcgtagggggcgcgcgtcgtagtcgtagtatagttcggttatttttagaaag

SEQ ID NO: 155 - DNA, 139 bp, Artificial Sequence
  TFAP2E (76256) MSP-Amplicon (on Bis-1)
tttagaagcggttttcgtatcgttgcggtgggcgttttcgggtttcgatttcgttagcgtcgcggggtagaggtatttggagttcgtagggtttagatttgggttggaaaagtttcgttgattgtaggtaagcgttcgg

SEQ ID NO: 156 - DNA, 97 bp, Artificial Sequence
  BARHL2 TSP PCR Amplicon
attgtttgttagtttttaagttaatcgtagtaataatcgttggattattttaaatgtggttaaaatcgacgttggataaaattaatttgttatatgt

SEQ ID NO: 157 - DNA, 163 bp, Artificial Sequence
  FOXL2 HM-Amplicon
ccaagacctgggcttgcagcgccgccaacaggcccggggacacgaggcgctccaggccggggtcttcccggctgctggcccctctcgctccccacccgctggcggcgcctcggtcgcccgcaattgacccaacccgcttcctgcgtttgcccctcaggtttcc

SEQ ID NO: 158 - DNA, 95 bp, Artificial Sequence
  TFAP2E HM-Amplicon
aaacccaaacctaaattaaaaaaacttcgctaactacaaacaaacgtccgaaaaaaacgaccaaacgaaaccccgacgctttaccacacacttcc

SEQ ID NO: 159 - DNA, 29 bp, Artificial Sequence
  ONECUT 1 3658891.1Forward
gttttgaaatttattagaataacgacgtt

SEQ ID NO: 160 - DNA, 31 bp, Artificial Sequence; identical to SEQ ID NO: 111
  ONECUT 13658891.1Reverse

SEQ ID NO: 161 - DNA, 21 bp, Artificial Sequence
  ONECUT 13658891.1Probe
tacggacgttcgcgggtcgtt

SEQ ID NO: 162 - DNA, 20 bp, Artificial Sequence
  FOXL2 17389-Forward
ccaaaacctaaacttacaac

SEQ ID NO: 163 - DNA, 16 bp, Artificial Sequence
  FOXL217389-Reverse
gagaggggttagtagt

SEQ ID NO: 164 - DNA, 31 bp, Artificial Sequence
  FOXL2 17389-Forward Blocker
tacaacaccaccaacaaacccaaaaacacaa

SEQ ID NO: 165 - DNA, 23 bp, Artificial Sequence
  FOXL2 17389-Reverse Blocker
ttgggaagattttggtttggagt

SEQ ID NO: 166 - DNA, 39 bp, Artificial Sequence
  FOXL2 17389-SC-CH3 (methylation specific Scorpion probe
ccgccgaaaacacgaaacggcgggagaggggttagtagt

SEQ ID NO: 167 - DNA, 49 bp, Artificial Sequence
  FOXL2 17389-SC-total (Scorpion probe specific for total DNA)
cccgggaagattttggtttggagcccgggccaaaacctaaacttacaac

SEQ ID NO: 168 - DNA, 20 bp, Artificial Sequence
  FOXL2 17389-Taqman probe specific for total DNA
ctccaaaccaaaatcttccc

SEQ ID NO: 169 - DNA, 19 bp, Artificial Sequence
  FOXL2 17389-Taqman probe specific for methylated DNA
ccgaaaacacgaaacgctc

SEQ ID NO: 170 - DNA, 21 bp, Artificial Sequence
  TFAP2E MSPepsilon-G2 (forward Primer) MSP-Amplicon (on Bis-1)
tttagaagcggttttcgtatc

SEQ ID NO: 171 - DNA, 20 bp, Artificial Sequence
  TFAP2E MSPepsilon-C1 (reverse Primer) MSP-Amplicon (on Bis-1)
ccgaacgcttacctacaatc

SEQ ID NO: 172 - DNA, 22 bp, Artificial Sequence
  TFAP2E MSPepsilon-P1 (Probe) MSP-Amplicon (on Bis-1)
ttgcggtgggcgttttcgggtt

SEQ ID NO: 173 - DNA, 20 bp, Artificial Sequence
  TFAP2E HM 76256-21 (forward Primer) (on Bis-2)
aaacccaaacctaaattaaa

SEQ ID NO: 174 - DNA, 17 bp, Artificial Sequence
  TFAP2E 76256-22 (reverse Primer) (on Bis-2)
ggaagtgtgtggtaaag

SEQ ID NO: 175 - DNA, 30 bp, Artificial Sequence
  TFAP2E 76256.2B5 (Blocker) (on Bis-2)
gtaaagtgttggggttttgtttggttgttt

SEQ ID NO: 176 - DNA, 26 bp, Artificial Sequence
  TFAP2E 76256-28dS (Probe) (on Bis-2)
aaaaacttcgctaactacaaacaaac

SEQ ID NO: 177 - DNA, 25 bp, Artificial Sequence
  BARHL2 Primer
attgtttgttagtttttaagttaat

SEQ ID NO: 178 - DNA, 27 bp, Artificial Sequence
  BARHL2 Primer
acatataacaaatatattttatccaac

SEQ ID NO: 179 - DNA, 26 bp, Artificial Sequence
  BARHL2 TAQMAN probe
ttggattattttaaatgtggttaaaa

1. A method for detecting cell proliferative disorders, in a subject comprising:
obtaining a biological sample from a subject; and
determining, using the biological sample, the expression levels or the cytosine methylation status or methylation level of at least one gene or genomic sequence selected from the group consisting of PTGER4; RUNX1; EVX2; EVX-1; SHOX2; SEQ ID NO: 6; CN027; LRAT; IL-12RB1; TFAP2C; BCL2; ARIDA5A (SEQ ID NO: 12); EN2; PRDM14; SEQ ID NO: 81; ARID5A (SEQ ID NO: 82); VAX1; ONECUT1; FOXL-2, TFAP2E, EN2-2, EN2-3, SHOX2-2 and BAHRL2, wherein at least one of hypermethylation and under-expression is indicative of the presence of said cell proliferative disorder.

2. The method accordingly to claim 1, wherein said cell proliferative disorder comprises cancer.

3. The method according to claim 1, wherein said cell proliferative disorder comprises lung carcinoma.

4. The method according to any of claims 1 to 3, wherein said expression level is determined by detecting the presence, absence or level of mRNA transcribed from at least one of the genes from the group consisting of PTGER4; RUNX1; EVX2; EVX-1; SHOX2; SEQ ID NO: 6; CN027; LRAT; IL-12RB1; TFAP2C; BCL2; ARIDA5A (SEQ ID NO: 12); EN2; PRDM14; SEQ ID NO: 81; ARID5A (SEQ ID NO: 82); VAX1; ONECUT1; FOXL-2, TFAP2E and BARHL2.

5. The method according to any of claims 1 to 3, wherein said expression level is determined by detecting the presence, absence or level of a polypeptide encoded by at least one of the genes from the group consisting of PTGER4; RUNX1; EVX2; EVX-1; SHOX2; SEQ ID NO: 6; CN027; LRAT; IL-12RB1; TFAP2C; BCL2; ARIDA5A (SEQ ID NO: 12); EN2; PRDM14; SEQ ID NO: 81; ARID5A (SEQ ID NO: 82); VAX1; ONECUT1; FOXL-2, TFAP2E and BARHL2 or sequence thereof.

6. The method according to any of claims 1 to 3, wherein said level or status of methylation is determined by detecting the presence or absence of CpG methylation within at least one of said genes or genomic sequences, wherein the presence of methylation indicates a risk of suffering from or the presence of cell proliferative disorders within said subject, preferably those according to Table 2.

7. The method for detecting cell proliferative disorders according to any of claims 1 to 3, comprising:
contacting genomic DNA isolated from a biological sample obtained from said subject with at least one reagent, or series of reagents that distinguishes between methylated and non-methylated CpG dinucleotides within at least one target region of the genomic DNA, wherein the target region comprises, or hybridizes under stringent conditions to a sequence of at least 16 contiguous nucleotides of SEQ ID NO: 1 to SEQ ID NO: 12; SEQ ID NO: 79 to SEQ ID NO: 83 and SEQ ID NO: 119 to SEQ ID NO: 125, wherein said contiguous nucleotides comprise at least one CpG dinucleotide sequence; and
detecting whether said target region is methylated or to which extent it is methylated, wherein detecting a cell proliferative disorder is afforded.

8. The method for detecting cell proliferative disorders, according to any one of claims 1 to 3, comprising:
a) extracting or otherwise isolating genomic DNA from the biological sample obtained from the subject;
b) treating the genomic DNA of a), or a fragment or portion thereof, with one or more reagents to convert cytosine bases that are unmethylated in the 5-position thereof to uracil or to another base that is detectably dissimilar to cytosine in terms of hybridization properties;
c) contacting the treated genomic DNA, or the treated fragment or portion thereof, with an amplification enzyme and at least one primer comprising, a contiguous sequence of at least 9 nucleotides that is complementary to, or hybridizes under moderately stringent or stringent conditions to a sequence selected from the group consisting of SEQ ID NO: 13 to SEQ ID NO: 60; SEQ ID NO: 84 to SEQ ID NO: 103, SEQ ID NO: 126 to SEQ ID NO: 153, and complements thereof, wherein the treated genomic DNA or the fragment thereof is either amplified to produce at least one amplificate, or is not amplified; and
d) determining, based on a presence or absence of, or on a property of said amplificate, the methylation state or level of at least one CpG dinucleotide of SEQ ID NO: 1 to SEQ ID NO: 12; SEQ ID NO: 79 to SEQ ID NO: 83 and SEQ ID NO: 119 to SEQ ID NO: 125, or an average, or a value reflecting an average methylation state or level of a plurality of CpG dinucleotides of SEQ ID NO: 1 to SEQ ID NO: 12; SEQ ID NO: 79 to SEQ ID NO: 83 and SEQ ID NO: 119 to SEQ ID NO: 125, whereby at least one of detecting and diagnosing cell proliferative disorders, is afforded.

9. The method of claim 8, wherein treating the genomic DNA, or the fragment thereof in b), comprises use of a reagent selected from the group comprising of bisulfite, hydrogen sulfite, disulfite, and combinations thereof.

10. The method of any of claims 1 to 3, wherein the biological sample obtained from the subject is selected from the group consisting of cells or cell lines, histological slides, biopsies, paraffin-embedded tissue, body fluids, ejaculate, urine, blood plasma, blood serum, whole blood, isolated blood cells, sputum, biological material derived from the oral epithelium or from the lung comprising bronchial lavage, bronchial alveolar lavage, bronchial brushing and bronchial abrasion, and combinations thereof.

11. The method for detecting cell proliferative disorders, according to any one of claims 1 to 3, comprising:
a) extracting or otherwise isolating genomic DNA from the biological sample obtained from the subject;
b) digesting the genomic DNA of a), or a fragment or portion thereof, with one or more methylation sensitive restriction enzymes;
c) contacting the DNA restriction enzyme digest of b), with an amplification enzyme and at least two primers suitable for the amplification of a sequence comprising at least one CpG dinucleotide of SEQ ID NO: 1 to SEQ ID NO: 12; SEQ ID NO: 79 to SEQ ID NO: 83 and SEQ ID NO: 119 to SEQ ID NO: 125; and
d) determining, based on a presence or absence of an amplificate the methylation state or level of at least one CpG dinucleotide of SEQ ID NO: 1 to SEQ ID NO: 12; SEQ ID NO: 79 to SEQ ID NO: 83 and SEQ ID NO: 119 to SEQ ID NO: 125, whereby at least one of detecting and diagnosing cell proliferative disorders is afforded.

12. A nucleic acid comprising at least 16 contiguous nucleotides of a treated genomic DNA sequence selected from the group consisting of SEQ ID NO: 13 to SEQ ID NO: 60; SEQ ID NO: 84 to SEQ ID NO: 103, SEQ ID NO: 126 to SEQ ID NO: 153, and sequences complementary thereto.

13. A nucleic acid comprising at least 50 contiguous nucleotides of a DNA sequence selected from the group consisting of SEQ ID NO: 13 to SEQ ID NO: 60; SEQ ID NO: 84 to SEQ ID NO: 103, SEQ ID NO: 126 to SEQ ID NO: 153, and sequences complementary thereto.

14. The nucleic acid of any one of claims 12 to 13, wherein the contiguous base sequence comprises at least one CpG, TpG or CpA dinucleotide sequence.

15. A nucleic acid comprising at least 16 contiguous nucleotides of a treated genomic DNA sequence selected from the group consisting of SEQ ID NO: 13 to SEQ ID NO: 60; SEQ ID NO: 84 to SEQ ID NO: 103, SEQ ID NO: 126 to SEQ ID NO: 153 and sequences complementary thereto as a diagnostic means to diagnose a cell proliferative disorder.

16. A kit suitable for performing the method according to claim 4 comprising:
a) a plurality of oligonucleotides or polynucleotides able to hybridise under stringent or moderately stringent conditions to the transcription products of at least one gene or genomic sequence selected from the group consisting of PTGER4; RUNX1; EVX2; EVX-1; SHOX2; SEQ ID NO: 6; CN027; LRAT; IL-12RB1; TFAP2C; BCL2; ARIDA5A (SEQ ID NO: 12); EN2; PRDM14; SEQ ID NO: 81; ARID5A (SEQ ID NO: 82); VAX1; ONECUT1; FOXL-2, TFAP2E, EN2-2, EN2-3 and SHOX2-2;
(b) a container suitable for containing the oligonucleotides or polynucleotides and a biological sample of the patient comprising the transcription products wherein the oligonucleotides or polynucleotides can hybridise under stringent or moderately stringent conditions to the transcription products;
(c) means to detect the hybridisation of (b); and optionally
(d) instructions for use and interpretation of the kit results.

17. A kit suitable for performing the method according to claim 5 comprising:
(a) a means for detecting at least one gene or genomic sequence selected from the group consisting of PTGER4; RUNX1; EVX2; EVX-1; SHOX2; SEQ ID NO: 6; CN027; LRAT; IL-12RB1; TFAP2C; BCL2; ARIDA5A (SEQ ID NO: 12); EN2; PRDM14; SEQ ID NO: 81; ARID5A (SEQ ID NO: 82); VAX1; EN2-2, EN2-3, SHOX2-2, ONECUT1; FOXL-2, and TFAP2E polypeptides;
(b) a container suitable for containing the said means and the biological sample of the patient comprising the polypeptides wherein the means can form complexes with the polypeptides; and
(c) a means to detect the complexes of (b).

18. A kit suitable for performing the method according to claim 6 comprising:
(a) a bisulfite reagent;
(b) a container suitable for containing the said bisulfite reagent and the biological sample of the patient; and
(c) at least one set of oligonucleotides containing two oligonucleotides whose sequences in each case are identical, are complementary, or hybridize under stringent or highly stringent conditions to a 9 or more preferably 18 base long segment of a sequence selected from SEQ ID NO: 13 to SEQ ID NO: 60; SEQ ID NO: 84 to SEQ ID NO: 103, SEQ ID NO: 126 to SEQ ID NO: 153.

19. A method for detecting a risk of a subject of suffering from a cell proliferative disorder, preferably lung carcinoma, comprising:
obtaining a biological sample isolated from a subject; and
determining, using the said biological sample, the expression level or cytosine methylation status or levels of at least one gene or genomic sequence selected from the group consisting of PTGER4; RUNX1; EVX2; EVX-1; SHOX2; SEQ ID NO: 6; CN027; LRAT; IL-12RB1; TFAP2C; BCL2; ARIDA5A (SEQ ID NO: 12); EN2; PRDM14; SEQ ID NO: 81; ARID5A (SEQ ID NO: 82); VAX1; EN2-2, EN2-3, SHOX2-2, ONECUT1; FOXL-2, and TFAP2E, wherein hyper-methylation and/or under-expression is indicative of said risk.

20. The method of claim 19, wherein the risk is an increased risk.
